(19) United States
(12) Patent Application Publication
(10) Pub. No.: US 2021/0047407 A1
(43) Pub. Date: Feb. 18, 2021

(54) LOW PH PHARMACEUTICAL ANTIBODY FORMULATION

(71) Applicant: AMGEN INC., Thousand Oaks, CA (US)

(72) Inventors: Twinkle R. Christian, Thousand Oaks, CA (US); Daxian Shan, Thousand Oaks, CA (US)

(21) Appl. No.: 16/964,452

(22) PCT Filed: Feb. 8, 2019
(86) PCT No.: PCT/US19/17294

§ 371 Date: Jul. 23, 2020

Related U.S. Application Data
(60) Provisional application No. 62/628,267, filed on Feb. 8, 2018.
(60) Provisional application No. 62/799,577, filed on Jan. 31, 2019.

(51) Int. Cl. C07K 16/28; A61K 47/61; A61K 47/60; A61K 47/54

(52) U.S. Cl. CPC C07K 16/2809; A61K 47/61; C07K 2317/94; A61K 47/542; A61K 47/60

(57) ABSTRACT

The present disclosure describes low pH formulations comprising, e.g., an antigen-binding protein that binds CD3, at least one buffer agent, at least one saccharide and at least one surfactant.

### CROSS-REFERENCE TO RELATED APPLICATIONS

[0001] The present application claims the benefit of priority to U.S. Provisional Application No. 62/628,267, filed Feb. 8, 2018 and U.S. Provisional Application No. 62/799,577, filed Jan. 31, 2019, the disclosures of which are incorporated herein by reference in their entireties.

### INCORPORATION BY REFERENCE

[0002] This application incorporates by reference International Patent Publication No. WO 2016/086196, filed on Nov. 25, 2015; U.S. Patent Publication No. 20160215063, filed on Nov. 25, 2015; International Patent Publication No. WO 2017/091656, filed on Nov. 23, 2016; and U.S. Pat. No. 9,822,186, filed on Mar. 30, 2015, which are expressly incorporated herein by reference in their entirety, with particular reference to the figures, legends and claims therein.

[0003] Incorporated by reference in its entirety is a computer-readable nucleotide/amino acid sequence listing submitted concurrently herewith and identified as follows: ASCII (text) file named “52588P_Seqlisting.txt”, 756,646 bytes created Feb. 5, 2019.

### BACKGROUND

[0004] Protein-based pharmaceuticals are among the fastest growing therapeutic agents in (pre)clinical development and as commercial products. In comparison with small chemical drugs, protein pharmaceuticals have high specificity and activity at relatively low concentrations, and typically provide for therapy of high impact diseases such as various cancers, auto-immune diseases, and metabolic disorders (Roberts, Trends Biotechnol. 2014 July; 32(7):372-80, Wang, Int J Pharm. 1999 Aug. 20; 185(2):129-88).

[0005] Protein-based pharmaceuticals, such as recombinant proteins, can now be obtained in high purity when first manufactured due to advances in commercial scale purification processes. However, proteins are only marginally stable and are highly susceptible to degradation, both chemical and physical. Chemical degradation refers to modifications involving covalent bonds, such as deamidation, oxidation, cleavage or formation of new disulfide bridges, hydrolysis, isomerization, or deglycosylation. Physical degradation includes protein unfolding, undesirable adsorption to surfaces, and aggregation. Dealing with these physical and chemical instabilities is one of the most challenging tasks in the development of protein pharmaceuticals (Chi et al., Pharm Res, Vol. 20, No. 9, September 2003, pp. 1325-1336, Roberts, Trends Biotechnol. 2014 July; 32(7):372-80).

[0006] Protein aggregation represents a major event of physical instability of proteins and occurs due to the inherent tendency to minimize the thermodynamically unfavorable interaction between the solvent and hydrophobic protein residues. It is particularly problematic because it is encountered routinely during refolding, purification, sterilization, shipping, and storage processes. Aggregation can occur even under solution conditions where the protein native state is highly thermodynamically favored (e.g., neutral pH and 37° C.) and in the absence of stresses (Chi et al., Pharm Res, Vol. 20, No. 9, September 2003, pp. 1325-1336, Roberts, Trends Biotechnol. 2014 July; 32(7):372-80, Wang, Int J Pharm. 1999 Aug. 20; 185(2):129-88, Mahler J Pharm Sci. 2009 September; 98(9):2909-34.).

[0007] Also half-life extended antibody constructs such as bispecific T cell engagers comprising a half-life extending modality such as Fc-molecules have to be protected against protein aggregation and/or other degradation events. Protein aggregation is problematic because it can impair biological activity of the therapeutic proteins. Moreover, aggregation of proteins leads to undesirable aesthetics of the drug product, and decreases product yield due to elaborate purification steps that are required to remove the aggregates from the end product. More recently, there has also been growing concern and evidence that the presence of aggregated proteins (even humanized or fully human proteins) can significantly increase the risk that a patient will develop an immune response to the active protein monomer, resulting in the formation of neutralizing antibodies and drug resistance, or other adverse side effects (Mahler J Pharm Sci. 2009 September; 98(9):2909-34).

[0008] In general, several efforts have been reported in the literature to minimize protein aggregation by various mechanisms. Proteins can be stabilized and thus protected from aggregate formation and other chemical changes by modifying their primary structure, thereby increasing interior hydrophobicity and reducing outer hydrophobicity. However, genetic engineering of proteins may result in impaired functionality and/or increased immunogenicity. Another approach focuses on the dissociation of aggregates (referred to as “disaggregation”) to recover functional, native monomers by using various mechanisms such as temperature, pressure, pH, and salts. Currently, protein aggregates are removed as impurities mainly in the polishing steps of downstream processing. However, in cases of high levels of high-molecular weight (HMW), removing significant amount of HMW not only results in substantial yield loss but also makes the design of a robust downstream process challenging (Chi et al., Pharm Res, Vol. 20, No. 9, September 2003, pp. 1325-1336).

[0009] Preserving protein stability and activity in biological and biotechnological applications poses serious challenges. There is a need in the art for optimized pharmaceutical compositions that provide for enhanced stabilization of therapeutic proteins and reduce aggregation and denaturation or degradation during formulation, filling, shipping, storage and administration, thereby preventing loss-of-function and adverse immunogenic reactions.

### SUMMARY

[0010] In one aspect, described herein is a pharmaceutical composition comprising an antigen-binding protein described herein, at least one buffer, at least one surfactant and at least one saccharide, wherein the pH of the pharmaceutical composition ranges from 3.5 to 5.

[0011] In some embodiments, the antigen-binding protein is an antibody. In some embodiments, the antibody is a bispecific antibody, such as a bispecific antibody that binds CD3.

[0012] In some embodiments, antigen-binding protein is a heterodimeric antibody that binds CD3. In some embodiments, the heterodimeric antibody comprises a) a first monomer comprising a first Fc domain and an anti-CD3 scFv comprising (i) a scFv variable light domain comprising vlCDR1 as set forth in SEQ ID NO: 15, vlCDR2 as set forth in SEQ ID NO: 16, and vlCDR3 as set forth in SEQ ID NO: 17, and (ii) a scFv variable heavy domain comprising vhCDR1 as set forth in SEQ ID NO: 11, vhCDR2 as set forth in SEQ ID NO: 12, and vhCDR3 as set forth in SEQ ID NO: 13, wherein said scFv is covalently attached to the N-terminus of said Fc domain using a domain linker; b) a second monomer comprising i) an anti-CD38 heavy variable domain comprising vhCDR1 as set forth in SEQ ID NO: 65, vhCDR2 as set forth in SEQ ID NO: 66, and vhCDR3 as set forth in SEQ ID NO: 67, and ii) a heavy constant domain comprising a second Fc domain; and c) a light chain comprising a constant domain and an anti-CD38 variable light domain comprising vlCDR1 as set forth in SEQ ID NO: 69, vlCDR2 as set forth in SEQ ID NO: 70, and vlCDR3 as set forth in SEQ ID NO: 71; and wherein the pH of the pharmaceutical composition ranges from 3.5 to 5.

[0013] In some embodiments, the anti-CD3 scFv comprises an amino acid sequence at least 90%, at least 95% or 100% identical to the amino acid sequence set forth in SEQ ID NO: 18.

[0014] In some embodiments, the anti-CD38 variable light domain comprises an amino acid sequence at least 90%, at least 95% or 100% identical to the amino acid sequence set forth in SEQ ID NO: 68.

[0015] In some embodiments, the anti-CD38 heavy variable domain comprises an amino acid sequence at least 90%, at least 95% or 100% identical to the amino acid sequence set forth in SEQ ID NO: 64.

[0016] In some embodiments, the first monomer comprises an amino acid sequence at least 90%, at least 95% or 100% identical to the amino acid sequence set forth in SEQ ID NO: 335.

[0017] In some embodiments, the second monomer comprises an amino acid sequence at least 90%, at least 95% or 100% identical to the amino acid sequence set forth in SEQ ID NO: 337.

[0018] In some embodiments, the light chain comprises an amino acid sequence at least 90%, at least 95% or 100% identical to the amino acid sequence set forth in SEQ ID NO: 336.

[0019] In various aspects, the antigen-binding protein is a heterodimeric antibody comprising a) a first monomer comprising a first heavy chain comprising: 1) a first variable heavy domain; 2) a first constant heavy chain comprising a first CH1 domain and a first Fc domain; and 3) a scFv that binds human CD3 and comprises (i) a scFv variable light domain comprising vlCDR1 set forth in SEQ ID NO:387, vlCDR2 set forth in SEQ ID NO: 388, and vlCDR3 set forth in SEQ ID NO: 389, (ii) a scFv linker, and (iii) a scFv variable heavy domain comprising vhCDR1 set forth in SEQ ID NO: 383, vhCDR2 set forth in SEQ ID NO: 384, and vhCDR3 set forth in SEQ ID NO: 385; wherein said scFv is covalently attached between the C-terminus of said CH1 domain and the N-terminus of said first Fc domain using domain linker(s). The heterodimeric antibody further comprises b) a second monomer comprising a second heavy chain comprising a second variable heavy domain and a second constant heavy chain comprising a second Fc domain; and c) a common light chain comprising a variable light domain and a constant light domain. The first variable heavy domain and the variable light domain bind human STEAP1, and the second variable heavy domain and the variable light domain bind human STEAP1. The first variable heavy domain and the second variable heavy domain comprises heavy chain CDRs comprising vhCDR1 set forth in SEQ ID NO: 360, vhCDR2 set forth in SEQ ID NO: 361 or SEQ ID NO: 363, and vhCDR3 set forth in SEQ ID NO: 362, and the variable light domain comprises light chain CDRs comprising vlCDR1 set forth in SEQ ID NO: 357, vlCDR2 set forth in SEQ ID NO: 358, and vlCDR3 set forth in SEQ ID NO: 359. Alternatively, the first variable heavy domain and the second variable heavy domain comprise heavy chain CDRs comprising vhCDR1 set forth in SEQ ID NO: 368, vhCDR2 set forth in SEQ ID NO: 369, and vhCDR3 set forth in SEQ ID NO: 370, and the variable light domain comprises light chain CDRs comprising vlCDR1 set forth in SEQ ID NO: 371, vlCDR2 set forth in SEQ ID NO: 372, and vlCDR3 set forth in SEQ ID NO: 373. In various embodiments, the first variable heavy domain and the second variable heavy domain comprise an amino acid sequence at least 90% identical (e.g., at least 95% identical or 100% identical) to SEQ ID NO: 377 or 379 and/or the variable light domain comprises an amino acid sequence at least 90% identical (e.g., at least 95% identical or 100% identical) to SEQ ID NO: 378. Alternatively, the first variable heavy domain and the second variable heavy domain comprise an amino acid sequence at least 90% identical (e.g., at least 95% identical or 100% identical) to SEQ ID NO: 380 and/or the variable light domain comprises an amino acid sequence at least 90% identical (e.g., at least 95% identical or 100% identical) to SEQ ID NO: 381. The scFv optionally comprises a variable heavy region and a variable light region of SEQ ID NO: 382 and SEQ ID NO:383. The scFv linker optionally comprises SEQ ID NO: 391. In various aspects, the scFv comprises the sequence of SEQ ID NO: 390. In various aspects, a) the first monomer comprises the sequence of SEQ ID NO: 366 or SEQ ID NO: 367, the second monomer comprises the sequence of SEQ ID NO:365, and the common light chain comprises the sequence of SEQ ID NO:364; or b) the first monomer comprises the sequence of SEQ ID NO: 376, the second monomer comprises the sequence of SEQ ID NO: 375, and the common light chain comprises the sequence of SEQ ID NO:374.

[0020] The pharmaceutical composition of the disclosure comprises at least one buffer agent. In some embodiments, the buffer agent is an acid selected from the group consisting of acetate, glutamate, citrate, succinate, tartrate, fumarate, maleate, histidine, phosphate, and 2-(N-morpholino)ethanesulfonate or a combination thereof. In some embodiments, the at least one buffer agent is present in the composition at a concentration ranging from about 5 mM to about 200 mM (or about 10 mM to about 50 mM).

[0021] The pharmaceutical composition of the disclosure comprises at least one saccharide. In some embodiments, the saccharide is selected from the group consisting of monosaccharide, disaccharide, cyclic polysaccharide, sugar alcohol, linear branched dextran, and linear non-branched dextran. In some embodiments, the saccharide is a sugar alcohol (e.g., sorbitol). In some embodiments, the saccharide is a disaccharide selected from the group consisting of sucrose, trehalose, mannitol, and sorbitol or a combination thereof. In some embodiments, the at least one saccharide is present in the composition at a concentration ranging from about 1 to about 15% (w/V) (or about 9 to about 12% (w/V) or about 5% to about 12% (w/V) or about 7% to about 12% (w/V)).

[0022] The pharmaceutical composition of the disclosure comprises at least one surfactant. In some embodiments, the surfactant is selected from the group consisting of polysorbate 20, polysorbate 40, polysorbate 60, polysorbate 80, poloxamer 188, pluronic F68, triton X-100, polyoxyethylen3, and PEG 3350, PEG 4000, or a combination thereof. In some embodiments, the at least one surfactant is present in the composition at a concentration ranging from 0.004 to about 0.5% (w/V) (or about 0.001 to about 0.01% (w/V), or about 0.001 to about 0.5% (w/V) or about 0.004 to about 0.01% (w/V)).

[0023] In some embodiments, the pH of the composition ranges from 4.0 to 5.0. In some embodiments, the pH of the composition is 4.2.

[0024] In some embodiments, the composition has an osmolarity in the range of about 150 to about 500 mOsm.

[0025] The pharmaceutical compositions of the disclosure may optionally further comprise an excipient selected from the group consisting of a polyol and an amino acid. In some embodiments, the excipient is present at a concentration ranging from about 0.1 to about 15% (w/V).

[0026] The pharmaceutical composition, in some embodiments, comprises 10 mM glutamate, 9% (w/V) sucrose and 0.01% (w/V) polysorbate 80, and wherein the pH of the liquid pharmaceutical composition is 4.2. In some embodiments, the heterodimeric antibody is present in the composition at a concentration ranging from about 0.1 mg/mL to about 8 mg/mL. In some embodiments, the heterodimeric antibody is present in the composition at a concentration ranging from about 0.1 mg/mL to about 20 mg/mL. In some embodiments, the heterodimeric antibody is present in the composition at a concentration of 1 mg/mL, 5 mg/mL, 10 mg/mL or 20 mg/mL. In some embodiments, the heterodimeric antibody is present in the composition in an amount ranging from about 50 μg to about 200 mg.

[0027] The pharmaceutical compositions of the disclosure can be a lyophilized composition or a liquid composition. In some embodiments, the pharmaceutical composition is a lyophilized composition or a reconstituted lyophilized composition.

[0028] In another aspect, described herein is a method of treating cancer in a subject in need thereof comprising administering a composition of the disclosure to the subject. In some embodiments, the cancer is multiple myeloma. In some embodiments, the cancer is prostate cancer.

[0029] It should be understood that while various embodiments in the specification are presented using “comprising” language, under various circumstances, a related embodiment may also be described using “consisting of” or “consisting essentially of” language. The disclosure contemplates embodiments described as “comprising” a feature to include embodiments which “consist of” the feature. It is to be noted that the term “a” or “an” refers to one or more, for example, “an immunoglobulin molecule,” is understood to represent one or more immunoglobulin molecules. As such, the terms “a” (or “an”), “one or more,” and “at least one” can be used interchangeably herein.

[0030] It should also be understood that when describing a range of values, the characteristic being described could be an individual value found within the range. For example, “a pH from about pH 4 to about pH 6,” could be, but is not limited to, pH 4, 4.2, 4.6, 5.1, 5.5 etc. and any value in between such values. Additionally, “a pH from about pH 4 to about pH 6,” should not be construed to mean that the pH of a formulation in question varies 2 pH units in the range from pH 4 to pH 6 during storage, but rather a value may be picked in that range for the pH of the solution, and the pH remains buffered at about that pH. In some embodiments, when the term “about” is used, it means the recited number plus or minus 5%, 10%, 15% or more of that recited number. The actual variation intended is determinable from the context.

[0031] In any of the ranges described herein, the endpoints of the range are included in the range. However, the description also contemplates the same ranges in which the lower and/or the higher endpoint is excluded. Additional features and variations of the invention will be apparent to those skilled in the art from the entirety of this application, including the drawing and detailed description, and all such features are intended as aspects of the invention. Likewise, features of the invention described herein can be re-combined into additional embodiments that also are intended as aspects of the invention, irrespective of whether the combination of features is specifically mentioned above as an aspect or embodiment of the invention. Also, only such limitations which are described herein as critical to the invention should be viewed as such; variations of the invention lacking limitations which have not been described herein as critical are intended as aspects of the invention.

[0032] All references cited herein are hereby incorporated by reference.

### BRIEF DESCRIPTION OF THE FIGURES

[0033] FIGS. 1A and 1B depict several formats of heterodimeric antibodies. Two forms of the “bottle opener” format are depicted, one with the anti-CD3 antigen binding domain comprising a scFv and the anti-CD38 antigen binding domain comprising a Fab (as examples of antigen-binding domains), and one with these reversed. The mAb-Fv, mAb-scFv, Central-scFv (or “XmAb²⁺¹” format) and Central-Fv formats are all shown. In addition, “one-armed” formats, where one monomer just comprises an Fc domain are shown, both a one arm Central-scFv and a one arm Central-Fv. A dual scFv format is also shown.

[0034] FIG. 2 depicts the sequences of the “High-Int #1” Anti-CD3_H1.32_L1.47 construct, including the variable heavy and light domains (CDRs underlined), as well as the individual vl and vhCDRs, as well as an scFv construct with a charged linker (double underlined). As is true of all the sequences depicted in the Figures, this charged linker may be replaced by an uncharged linker or a different charged linker, as needed.

[0035] FIG. 3 depicts the sequences of the intermediate CD38: OKT10_H1L1.24 construct, including the variable heavy and light domains (CDRs underlined), as well as the individual vl and vhCDRs, as well as an scFv construct with a charged linker (double underlined).

[0036] FIG. 4 depicts the sequences of the Low CD38: OKT10_H1L1 construct, including the variable heavy and light domains (CDRs underlined), as well as the individual vl and vhCDRs, as well as an scFv construct with a charged linker (double underlined).

[0037] FIG. 5 depicts the sequences of XENP18971. CDRs are underlined.

[0038] FIG. 6 depicts the sequences of XENP18969. CDRs are underlined.

[0039] FIG. 7 depicts the sequence of human CD3ε (SEQ ID NO: 130).

[0040] FIG. 8 depicts the full length (SEQ ID NO:131) and extracellular domain (ECD; SEQ ID NO:132) of the human CD38 protein.

[0041] FIGS. 9A-9E depict useful pairs of heterodimerization variant sets (including skew and pI variants).

[0042] FIG. 10 depicts a list of isosteric variant antibody constant regions and their respective substitutions. pI_(−) indicates lower pI variants, while pI_(+) indicates higher pI variants. These can be optionally and independently combined with other heterodimerization variants of the invention (and other variant types as well, as outlined herein).

[0043] FIG. 11 depicts useful ablation variants that ablate FcγR binding (sometimes referred to as “knock outs” or “KO” variants).

[0044] FIG. 12 shows two embodiments of antibodies of the disclosure.

[0045] FIGS. 13A and 13B depict a number of charged scFv linkers that find use in increasing or decreasing the pI of heterodimeric antibodies that utilize one or more scFv as a component. A single prior art scFv linker with a single charge is referenced as “Whitlow,” from Whitlow et al., Protein Engineering 6(8):989-995 (1993). It should be noted that this linker was used for reducing aggregation and enhancing proteolytic stability in scFvs.

[0046] FIG. 14 depicts a list of engineered heterodimer-skewing Fc variants with heterodimer yields (determined by HPLC-CIEX) and thermal stabilities (determined by DSC). Not determined thermal stability is denoted by “n.d.”

[0047] FIGS. 15A and 15B depict stability-optimized, humanized anti-CD3 variant scFvs. Substitutions are given relative to the H1_L1.4 scFv sequence. Amino acid numbering is Kabat numbering.

[0048] FIGS. 16A and 16B depict amino acid sequences of stability-optimized, humanized anti-CD3 variant scFvs. CDRs are underlined. For each heavy chain/light chain combination, four sequences are listed: (i) scFv with C-terminal 6×His tag, (ii) scFv alone, (iii) VH alone, (iv) VL alone.

[0049] FIG. 17 depicts the sequences of XENP18971. CDRs are underlined.

[0050] FIG. 18 depicts the sequences of XENP18969. CDRs are underlined.

[0051] FIG. 19 shows a matrix of possible combinations of embodiments. An “A” means that the CDRs of the referenced CD3 sequences can be combined with the CDRs of CD38 construct on the left hand side. That is, for example for the top left hand cell, the vhCDRs from the variable heavy chain CD3 H1.30 sequence and the vlCDRs from the variable light chain of CD3 L1.47 sequence can be combined with the vhCDRs from the CD38 OKT10 H1.77 sequence and the vlCDRs from the OKT10L1.24 sequence. A “B” means that the CDRs from the CD3 constructs can be combined with the variable heavy and light domains from the CD38 construct. That is, for example for the top left hand cell, the vhCDRs from the variable heavy chain CD3 H1.30 sequence and the vlCDRs from the variable light chain of CD3 L1.47 sequence can be combined with the variable heavy domain CD38 OKT10 H1.77 sequence and the OKT10L1.24 sequence. A “C” is reversed, such that the variable heavy domain and variable light domain from the CD3 sequences are used with the CDRs of the CD38 sequences. A “D” is where both the variable heavy and variable light chains from each are combined. An “E” is where the scFv of the CD3 is used with the CDRs of the CD38 antigen binding domain construct, and an “F” is where the scFv of the CD3 is used with the variable heavy and variable light domains of the CD38 antigen binding domain.

[0052] FIG. 20 depicts the sequences of XmAb18968, also referenced herein as Antibody A. CDRs are underlined.

[0053] FIG. 21 is a table associating various CDR sequences, variable region sequences, heavy and light chain sequences, scFv sequences, backbone sequences, etc., with sequence identifiers set forth in the sequence listing accompanying the instant application. Regarding the several bottle opener format backbones noted (SEQ ID NOs: 347-354), the sequences are provided without the Fv sequences (e.g., the scFv and the vh and vl for the Fab side). As will be appreciated by those in the art and outlined below, these sequences can be used with any vh and vl pairs outlined herein, with one monomer including a scFv (optionally including a charged scFv linker) and the other monomer including the Fab sequences (e.g., a vh attached to the “Fab side heavy chain” and a vl attached to the “constant light chain”). The scFv can be anti-CD3 or anti-CD38, with the Fab being the other. (“Fab” referring to the portion that comprises the VH, CH1, VL, and CL immunoglobulin domains.) That is, for example, any Fv sequences outlined herein for CD3 and CD38 can be incorporated into these backbones in any combination.

[0054] FIGS. 22A and 22B show the main peak loss of Antibody A when formulated in Formulation A (FIG. 22A) and Formulation B (FIG. 22B) as determined by SE-UHPLC.

[0055] FIG. 23 shows the main peak loss of Antibody A when formulated in Formulation C as determined by SE-UHPLC.

[0056] FIGS. 24A and 24B show the main peak loss of Antibody A when formulated in Formulation A (FIG. 24A) and Formulation B (FIG. 24B) as determined by CE-HPLC.

[0057] FIG. 25 shows the main peak loss of Antibody A when formulated in Formulation C as determined by CE-HPLC.

[0058] FIG. 26 shows a main peak loss of Antibody A at −30° C. when formulated in Formulation A as determined by rCE.

[0059] FIG. 27 shows a main peak loss of Antibody A at 40° C. when formulated in Formulation B as determined by rCE.

[0060] FIG. 28 shows a main peak loss of Antibody A when formulated in Formulation C as determined by rCE.

[0061] FIG. 29 shows the percent deamidation of Antibody A when formulated in Formulations B and C at 4° C., 2° C., and 40° C. for three months as determined by MAM.

[0062] FIG. 30 shows the percent deamidation of Antibody A when formulated in Formulation D at 40° C. for 0 weeks, two weeks and four weeks as determined by MAM.

[0063] FIG. 31 shows the percent deamidation of Antibody A when formulated in Formulations B and C at 40° C. for 1 month as determined by MAM.

### DETAILED DESCRIPTION

[0064] The present disclosure describes low pH formulations comprising an antigen-binding protein that binds CD3.

[0065] In some embodiments, the antigen-binding protein is an antibody, such as a bispecific antibody (e.g., a bispecific antibody that binds CD3). In some embodiments, the antigen-binding protein is a heterodimeric antibody that co-engages CD3 and CD38 in such a manner so as to transiently connect malignant cells with T cells, thereby inducing T cell mediated killing of the bound malignant cell. In other embodiments, the antigen-binding protein is a heterodimeric antibody that co-engages CD3 and STEAP1.

[0066] Specific protein-based pharmaceuticals are not stable in liquid formulations over a longer period of time and especially not refrigeration temperature 4° C. and above. A general concept underlying the present invention is the finding that colloidal stability of a liquid pharmaceutical composition comprising an antigen-binding protein according to the present invention is improved at low pH.

[0067] Various aspects of the formulation are described below. The use of section headings are merely for the convenience of reading, and not intended to be limiting per se. The entire document is intended to be viewed as a unified disclosure, and it should be understood that all combinations of features described herein are contemplated.

[0068] In one aspect, described herein is a pharmaceutical composition comprising an antigen-binding protein described herein, at least one buffer, at least one surfactant and at least one saccharide, wherein the pH of the pharmaceutical composition ranges from 3.5 to 5.

[0069] Buffers

[0070] The pharmaceutical composition of the invention comprises a buffer, which optionally may be selected from the group consisting of acetate, glutamate, citrate, succinate, tartrate, fumarate, maleate, histidine, phosphate, 2-(N-morpholino)ethanesulfonate, potassium phosphate, acetic acid/sodium acetate, citric acid/sodium citrate, succinic acid/sodium succinate, tartaric acid/sodium tartrate, histidine/histidine HCl, glycine, Tris, glutamate, and combinations thereof. In some embodiments, the pharmaceutical composition comprises at least one buffer selected from the group consisting of acetate, glutamate, citrate, succinate, tartrate, fumarate, maleate, histidine, phosphate, 2-(N-morpholino)ethanesulfonate and combinations thereof.

[0071] Buffering agents are often employed to control pH in the formulation. In some embodiments, the buffer is added in a concentration that maintains pH of the formulation of about 3.5 to 5, or about 4 to 5, or about 4.2. The effect of pH on formulations may be characterized using any one or more of several approaches such as accelerated stability studies and calorimetric screening studies (Remmele R. L. Jr., et al., Biochemistry, 38(16): 5241-7 (1999)).

[0072] Organic acids, phosphates and Tris are suitable buffers in protein formulations (Table 1). The buffer capacity of the buffering species is maximal at a pH equal to the pKa and decreases as pH increases or decreases away from this value. Ninety percent of the buffering capacity exists within one pH unit of its pKa. Buffer capacity also increases proportionally with increasing buffer concentration.

[0073] Several factors are typically considered when choosing a buffer. For example, the buffer species and its concentration should be defined based on its pKa and the desired formulation pH. Also important is to ensure that the buffer is compatible with the protein drug, other formulation excipients, and does not catalyze any degradation reactions. Recently, polyanionic carboxylate buffers such as citrate and succinate have been shown to form covalent adducts with the side chain residues of proteins. A third aspect to be considered is the sensation of stinging and irritation the buffer may induce. For example, citrate is known to cause stinging upon injection (Laursen T, et al., Basic Clin Pharmacol Toxicol., 98(2): 218-21 (2006)). The potential for stinging and irritation is greater for drugs that are administered via the SC or IM routes, where the drug solution remains at the site for a relatively longer period of time than when administered by the IV route where the formulation gets diluted rapidly into the blood upon administration. For formulations that are administered by direct IV infusion, the total amount of buffer (and any other formulation component) needs to be monitored. For example, it has been reported that potassium ions administered in the form of the potassium phosphate buffer, can induce cardiovascular effects in a patient (Hollander-Rodriguez J C, et al., Am. Fam. Physician., 73(2): 283-90 (2006)).

TABLE 1
Buffering agents and their pKₐ values

| Buffer | pKₐ | Example drug product |
|---|---|---|
| Acetate | 4.8 | Neupogen, Neulasta |
| Succinate | pKₐ₁ = 4.8, pKₐ₂ = 5.5 | Actimmune |
| Citrate | pKₐ₁ = 3.1, pKₐ₂ = 4.8, | Humira |
| | pKₐ₃ = 6.4 | |
| Histidine | 6.0 | Xolair |
| (imidazole) | | |
| Phosphate | pKₐ₁ = 2.15, pKₐ₂ = 7.2, | Enbrel (liquid formulation) |
| | pKₐ₃ = 12.3 | |
| Tris | 8.1 | Leukine |

[0074] The buffer system present in the formulation is selected to be physiologically compatible and to maintain a desired pH.

[0075] The buffer may be present in any amount suitable to maintain the pH of the formulation at a predetermined level. The buffer may be present at a concentration between about 0.1 mM and about 1000 mM (1 M), or between about 5 mM and about 200 mM, or between about 5 mM to about 100 mM, or between about 10 mM and 50 about mM. Suitable buffer concentrations encompass concentrations of about 200 mM or less. In some embodiments, the buffer in the formulation is present in a concentration of about 190 mM, about 180 mM, about 170 mM, about 160 mM, about 150 mM, about 140 mM, about 130 mM, about 120 mM, about 110 mM, about 100 mM, about 80 mM, about 70 mM, about 60 mM, about 50 mM, about 40 mM, about 30 mM, about 20 mM, about 10 mM or about 5 mM. In some embodiments, the concentration of the buffer is at least 0.1, 0.5, 0.7, 0.8 0.9, 1.0, 1.2, 1.5, 1.7, 2, 3, 4, 5, 6, 7, 8, 9, 10, 11, 12, 13, 14, 15, 16, 17, 18, 19, 20, 30, 40, 50, 60, 70, 80, 90, 100, 200, 500, 700, or 900 mM. In some embodiments, the concentration of the buffer is between 1, 1.2, 1.5, 1.7, 2, 3, 4, 5, 6, 7, 8, 9, 10, 11, 12, 13, 14, 15, 16, 17, 18, 19, 20, 30, 40, 50, 60, 70, 80, or 90 mM and 100 mM. In some embodiments, the concentration of the buffer is between 5, 6, 7, 8, 9, 10, 11, 12, 13, 14, 15, 16, 17, 18, 19, 20, 30, or 40 mM and 50 mM. In some embodiments, the concentration of the buffer is about 10 mM.

[0076] Other exemplary pH buffering agents used to buffer the formulation as set out herein include, but are not limited to glycine, glutamate, succinate, phosphate, acetate, and aspartate. Amino acids such as histidine and glutamic acid can also be used as buffering agents.

[0077] Surfactants

[0078] The pharmaceutical compositions described here comprise at least one surfactant. Surfactants are commonly used in protein formulations to prevent surface-induced degradation. Surfactants are amphipathic molecules with the capability of out-competing proteins for interfacial positions. Hydrophobic portions of the surfactant molecules occupy interfacial positions (e.g., air/liquid), while hydrophilic portions of the molecules remain oriented towards the bulk solvent. At sufficient concentrations (typically around the detergent's critical micellar concentration), a surface layer of surfactant molecules serve to prevent protein molecules from adsorbing at the interface. Thereby, surface-induced degradation is minimized. Surfactants include, e.g., fatty acid esters of sorbitan polyethoxylates, i.e., polysorbate 20 and polysorbate 80 (see e.g., Avonex®, Neupogen®, Neulasta®). The two differ only in the length of the aliphatic chain that imparts hydrophobic character to the molecules, C-12 and C-18, respectively. Accordingly, polysorbate-80 is more surface-active and has a lower critical micellar concentration than polysorbate-20. The surfactant poloxamer 188 has also been used in several marketed liquid products such Gonal-F®, Norditropin®, and Ovidrel®.

[0079] Detergents can also affect the thermodynamic conformational stability of proteins. Here again, the effects of a given excipient will be protein specific. For example, polysorbates have been shown to reduce the stability of some proteins and increase the stability of others. Detergent destabilization of proteins can be rationalized in terms of the hydrophobic tails of the detergent molecules that can engage in specific binding with partially or wholly unfolded protein states. These types of interactions could cause a shift in the conformational equilibrium towards the more expanded protein states (i.e., increasing the exposure of hydrophobic portions of the protein molecule in complement to binding polysorbate). Alternatively, if the protein native state exhibits some hydrophobic surfaces, detergent binding to the native state may stabilize that conformation.

[0080] Another aspect of polysorbates is that they are inherently susceptible to oxidative degradation. Often, as raw materials, they contain sufficient quantities of peroxides to cause oxidation of protein residue side-chains, especially methionine. The potential for oxidative damage arising from the addition of stabilizer emphasizes the point that the lowest effective concentrations of excipients should be used in formulations. For surfactants, the effective concentration for a given protein will depend on the mechanism of stabilization. It has been postulated that if the mechanism of surfactant stabilization is related to preventing surface-denaturation the effective concentration will be around the detergent's critical micellar concentration. Conversely, if the mechanism of stabilization is associated with specific protein-detergent interactions, the effective surfactant concentration will be related to the protein concentration and the stoichiometry of the interaction (Randolph T. W., et al., Pharm Biotechnol., 13:159-75 (2002)).

[0081] Surfactants may also be added in appropriate amounts to prevent surface related aggregation phenomenon during freezing and drying (Chang, B, J. Pharm. Sci. 85:1325, (1996)). Exemplary surfactants include anionic, cationic, nonionic, zwitterionic, and amphoteric surfactants including surfactants derived from naturally-occurring amino acids. Anionic surfactants include, but are not limited to, sodium lauryl sulfate, dioctyl sodium sulfosuccinate and dioctyl sodium sulfonate, chenodeoxycholic acid, N-lauroylsarcosine sodium salt, lithium dodecyl sulfate, 1-octanesulfonic acid sodium salt, sodium cholate hydrate, sodium deoxycholate, and glycodeoxycholic acid sodium salt. Cationic surfactants include, but are not limited to, benzalkonium chloride or benzethonium chloride, cetylpyridinium chloride monohydrate, and hexadecyltrimethylammonium bromide. Zwitterionic surfactants include, but are not limited to, CHAPS, CHAPSO, SB3-10, and SB3-12. Non-ionic surfactants include, but are not limited to, digitonin, Triton X-100, Triton X-114, TWEEN-20, and TWEEN-80. In another embodiment, surfactants include lauromacrogol 400; polyoxyl 40 stearate; polyoxyethylene hydrogenated castor oil 10, 40, 50 and 60; glycerol monostearate; polysorbate 40, 60, 65 and 80; soy lecithin and other phospholipids such as DOPC, DMPG, DMPC, and DOPG; sucrose fatty acid ester; methyl cellulose and carboxymethyl cellulose.

[0082] Pharmaceutical compositions described herein comprise at least one surfactant, either individually or as a mixture in different ratios. In some embodiments, the composition comprises a surfactant at a concentration of about 0.001% to about 5% w/v (or about 0.004 to about 0.5% w/v or about 0.001 to about 0.01% w/v or about 0.004 to about 0.01% w/v). In some embodiments, the composition comprises a surfactant at a concentration of at least 0.001, at least 0.002, at least 0.003, at least 0.004, at least 0.005, at least 0.007, at least 0.01, at least 0.05, at least 0.1, at least 0.2, at least 0.3, at least 0.4, at least 0.5, at least 0.6, at least 0.7, at least 0.8, at least 0.9, at least 1.0, at least 1.5, at least 2.0, at least 2.5, at least 3.0, at least 3.5, at least 4.0, or at least 4.5% w/v. In some embodiments, the composition comprises a surfactant at a concentration of about 0.004% to about 0.5% w/v. In some embodiments, the composition comprises a surfactant at a concentration of about 0.004 to about 0.5% w/v. In some embodiments, the composition comprises a surfactant at a concentration of about 0.001 to about 0.01% w/v. In some embodiments, the composition comprises a surfactant at a concentration of about 0.004 to about 0.01% w/v. In some embodiments, the composition comprises a surfactant at a concentration of about 0.004, about 0.005, about 0.007, about 0.01, about 0.05, about 0.1, about 0.2, about 0.3, about 0.4% w/v to about 0.5% w/v. In some embodiments, the composition comprises a surfactant incorporated in a concentration of about 0.001% to about 0.01% w/v. In some embodiments, the surfactant is polysorbate 80 and the polysorbate 80 is present in a concentration of about 0.01% w/v.

[0083] Saccharides

[0084] The pharmaceutical compositions described herein comprise at least one saccharide. A saccharide can be added as a stabilizer or a bulking agent. The term “stabilizer” as used herein refers to an excipient capable of preventing aggregation or other physical degradation, as well as chemical degradation (for example, autolysis, deamidation, oxidation, etc.) in an aqueous and solid state. Stabilizers that are employed in pharmaceutical compositions include, but are not limited to, sucrose, trehalose, mannose, maltose, lactose, glucose, raffinose, cellobiose, gentiobiose, isomaltose, arabinose, glucosamine, fructose, mannitol, sorbitol, glycine, arginine HCL, poly-hydroxy compounds, including polysaccharides such as dextran, starch, hydroxyethyl starch, cyclodextrins, N-methyl pyrollidene, cellulose and hyaluronic acid, and sodium chloride (Carpenter et al., Develop. Biol. Standard 74:225, (1991)).

[0085] In some embodiments, the at least one saccharide is selected from the group consisting of monosaccharide, disaccharide, cyclic polysaccharide, sugar alcohol, linear branched dextran, and linear non-branched dextran, and combinations thereof. In some embodiments, the at least one saccharide is a disaccharide selected from the group consisting of sucrose, trehalose, mannitol, and sorbitol or a combination thereof.

[0086] In some embodiments, the pharmaceutical composition comprises at least one saccharide at a concentration of about 0.01% to about 40% w/v, or about 00.1% to about 20% w/v, or about 1% to about 15% w/v. In some embodiments, the pharmaceutical composition comprises at least one saccharide at a concentration of at least 0.5, at least 1, at least 2, at least 3, at least 4, at least 5, at least 6, at least 7, at least 8, at least 9, at least 10, at least 11, at least 12, at least 13, at least 14, at least 15, at least 16, at least 17, at least 18, at least 19, at least 20, at least 30, or at least 40% w/v. In some embodiments, the pharmaceutical composition comprises at least one saccharide at a concentration of about 1, about 2, about 3, about 4, about 5, about 6, about 7, about 8, about 9, about 10, about 11, about 12, about 13, about 14% to about 15% w/v. In some embodiments, the pharmaceutical composition comprises at least one saccharide at a concentration of about 1% to about 15% w/v. In a yet further embodiment, the pharmaceutical composition comprises at least one saccharide at a concentration of about 9%, about 9.5%, about 10%, about 10.5%, about 11%, about 11.5%, or about 12% w/v. In some embodiments, the pharmaceutical composition comprises at least one saccharide at a concentration of about 9% to about 12% w/v. In some embodiments, the at least one saccharide is in the composition at a concentration of about 9% w/v. In some embodiments, the at least one saccharide is selected from the group consisting of sucrose, trehalose, mannitol and sorbitol or a combination thereof. In some embodiments, the saccharide is sorbitol and is present in the composition ranging from about 9% to about 12% w/v.

[0087] If desired, the formulations also include appropriate amounts of bulking and osmolarity regulating agents, such as a saccharide, suitable for forming a lyophilized “cake.”

[0088] In a preferred embodiment, the pharmaceutical composition comprises 10 mM glutamate, 9% (w/V) sucrose and 0.01% (w/V) polysorbate 80, wherein the pH of the pharmaceutical composition is 4.2.

[0089] Other Considerations

[0090] As used herein, the term “pharmaceutical composition” relates to a composition which is suitable for administration to a subject in need thereof. The terms “subject” or “individual” or “animal” or “patient” are used interchangeably herein to refer to any subject, particularly a mammalian subject, for whom administration of the pharmaceutical composition of the invention is desired. Mammalian subjects include humans, non-human primates, dogs, cats, guinea pigs, rabbits, rats, mice, horses, cattle, cows, and the like, with humans being preferred. The pharmaceutical composition of the present invention is stable and pharmaceutically acceptable, i.e., capable of eliciting the desired therapeutic effect without causing significant undesirable local or systemic effects in the subject to which the pharmaceutical composition is administered. Pharmaceutically acceptable compositions of the invention may be sterile and/or pharmaceutically inert. Specifically, the term “pharmaceutically acceptable” can mean approved by a regulatory agency or other generally recognized pharmacopoeia for use in animals, and more particularly in humans.

[0091] The formulation provided by the disclosure comprises an antigen-binding protein (e.g., heterodimeric antibody) described herein. In some embodiments, the heterodimeric antibody is provided in a therapeutically effective amount. By “therapeutically effective amount” is meant an amount of said heterodimeric antibody that elicits the desired therapeutic effect. Therapeutic efficacy and toxicity can be determined by standard pharmaceutical procedures in cell cultures or experimental animals, e.g., ED50 (the dose therapeutically effective in 50% of the population) and LD50 (the dose lethal to 50% of the population). The dose ratio between therapeutic and toxic effects is the therapeutic index, and it can be expressed as the ratio, ED50/LD50. Formulations that exhibit large therapeutic indices are generally preferred.

[0092] Protein formulations are generally administered parenterally. When given parenterally, they must be sterile. Sterile diluents include liquids that are pharmaceutically acceptable (safe and non-toxic for administration to a human) and useful for the preparation of a liquid formulation, such as a formulation reconstituted after lyophilization. Exemplary diluents include sterile water, bacteriostatic water for injection (BWFI), a pH buffered solution (e.g., phosphate-buffered saline), sterile saline solution, Ringer's solution or dextrose solution. Diluents can include aqueous solutions of salts and/or buffers.

[0093] Excipients are additives that are included in a formulation because they either impart or enhance the stability, delivery and manufacturability of a drug product. Regardless of the reason for their inclusion, excipients are an integral component of a drug product and therefore need to be safe and well tolerated by patients. For protein drugs, the choice of excipients is particularly important because they can affect both efficacy and immunogenicity of the drug. Hence, protein formulations need to be developed with appropriate selection of excipients that afford suitable stability, safety, and marketability.

[0094] The excipients described herein are organized either by their chemical type or their functional role in formulations. Brief descriptions of the modes of stabilization are provided when discussing each excipient type. Given the teachings and guidance provided herein, those skilled in the art will readily be able to vary the amount or range of excipient without increasing viscosity to an undesirable level. Excipients may be chosen to achieve a desired osmolality (i.e., isotonic, hypotonic or hypertonic) of the final solution, pH, desired stability, resistance to aggregation or degradation or precipitation, protection under conditions of freezing, lyophilization or high temperatures, or other properties. A variety of types of excipients are known in the art. Exemplary excipients include salts, amino acids, other tonicity agents, surfactants, stabilizers, bulking agents, cryoprotectants, lyoprotectants, anti-oxidants, metal ions, chelating agents and/or preservatives.

[0095] Further, where a particular excipient is reported in a formulation by, e.g., percent (%) w/v, those skilled in the art will recognize that the equivalent molar concentration of that excipient is also contemplated.

[0096] Other Stabilizers and Bulking Agents

[0097] Stabilizers include a class of compounds that can serve as cryoprotectants, lyoprotectants, and glass forming agents. Cryoprotectants act to stabilize proteins during freezing or in the frozen state at low temperatures. Lyoprotectants stabilize proteins in the freeze-dried solid dosage form by preserving the native-like conformational properties of the protein during dehydration stages of freeze-drying. Glassy state properties have been classified as “strong” or “fragile” depending on their relaxation properties as a function of temperature. It is important that cryoprotectants, lyoprotectants, and glass forming agents remain in the same phase with the protein in order to impart stability. Sugars, polymers, and polyols fall into this category and can sometimes serve all three roles.

[0098] Polyols encompass a class of excipients that includes sugars (e.g., mannitol, sucrose, or sorbitol), and other polyhydric alcohols (e.g., glycerol and propylene glycol). The polymer polyethylene glycol (PEG) is included in this category. Polyols are commonly used as stabilizing excipients and/or isotonicity agents in both liquid and lyophilized parenteral protein formulations. Polyols can protect proteins from both physical and chemical degradation pathways.

[0099] Exemplary C₃-C₆ polyols include propylene glycol, glycerin (glycerol), threose, threitol, erythrose, erythritol, ribose, arabinose, arabitol, lyxose, maltitol, sorbitol, sorbose, glucose, mannose, mannitol, levulose, dextrose, maltose, trehalose, fructose, xylitol, inositol, galactose, xylose, fructose, sucrose, 1,2,6-hexanetriol and the like. Higher order sugars include dextran, propylene glycol, or polyethylene glycol. Reducing sugars such as fructose, maltose or galactose oxidize more readily than do non-reducing sugars. Additional examples of sugar alcohols are glucitol, maltitol, lactitol or iso-maltulose. Additional exemplary lyoprotectants include glycerin and gelatin, and the sugars mellibiose, melezitose, raffinose, mannotriose and stachyose. Examples of reducing sugars include glucose, maltose, lactose, maltulose, iso-maltulose and lactulose. Examples of non-reducing sugars include non-reducing glycosides of polyhydroxy compounds selected from sugar alcohols and other straight chain polyalcohols. Monoglycosides include compounds obtained by reduction of disaccharides such as lactose, maltose, lactulose and maltulose.

[0100] Amino Acids

[0101] In some embodiments, the pharmaceutical compositions described herein further comprise one or more amino acids. Amino acids have found versatile use in protein formulations as buffers, bulking agents, stabilizers and antioxidants. Histidine and glutamic acid are employed to buffer protein formulations in the pH range of 5.5-6.5 and 4.0-5.5 respectively. The imidazole group of histidine has a pKa=6.0 and the carboxyl group of glutamic acid side chain has a pKa of 4.3 which makes them suitable for buffering in their respective pH ranges. Glutamic acid is found in some formulations (e.g., Stemgen®). Histidine is commonly found in marketed protein formulations (e.g., Xolair®, Herceptin®, Recombinate®). It provides a good alternative to citrate, a buffer known to sting upon injection. Interestingly, histidine has also been reported to have a stabilizing effect when used at high concentrations in both liquid and lyophilized presentations (Chen B, et al., Pharm Res., 20(12): 1952-60 (2003)). Histidine (up to 60 mM) was also observed to reduce the viscosity of a high concentration formulation of an antibody. However, in the same study, the authors observed increased aggregation and discoloration in histidine containing formulations during freeze-thaw studies of the antibody in stainless steel containers. The authors attributed this to an effect of iron ions leached from corrosion of steel containers. Another note of caution with histidine is that it undergoes photo-oxidation in the presence of metal ions (Tomita M, et al., Biochemistry, 8(12): 5149-60 (1969)). The use of methionine as an antioxidant in formulations appears promising; it has been observed to be effective against a number of oxidative stresses (Lam X M, et al., J Pharm Sci., 86(11): 1250-5 (1997)).

[0102] The amino acids glycine, proline, serine and alanine stabilize proteins. Glycine is also a commonly used bulking agent in lyophilized formulations (e.g., Neumega®, Genotropin®, Humatrope®). Arginine has been shown to be an effective agent in inhibiting aggregation and has been used in both liquid and lyophilized formulations (e.g., Activase®, Avonex®, Enbrel® liquid).

[0103] Antioxidants

[0104] In some embodiments, the pharmaceutical composition described herein further comprises one or more antioxidants. Oxidation of protein residues arises from a number of different sources. Beyond the addition of specific antioxidants, the prevention of oxidative protein damage involves the careful control of a number of factors throughout the manufacturing process and storage of the product such as atmospheric oxygen, temperature, light exposure, and chemical contamination. The most commonly used pharmaceutical antioxidants are reducing agents, oxygen/free-radical scavengers, or chelating agents. Antioxidants in therapeutic protein formulations must be water-soluble and remain active throughout the product shelf-life. Reducing agents and oxygen/free-radical scavengers work by ablating active oxygen species in solution. Chelating agents such as EDTA can be effective by binding trace metal contaminants that promote free-radical formation. For example, EDTA was utilized in the liquid formulation of acidic fibroblast growth factor to inhibit the metal ion catalyzed oxidation of cysteine residues. EDTA has been used in marketed products like Kineret® and Ontak®.

[0105] However, antioxidants themselves can induce other covalent or physical changes to the protein. A number of such cases have been reported in the literature. Reducing agents (like glutathione) can cause disruption of intramolecular disulfide linkages, which can lead to disulfide shuffling. In the presence of transition metal ions, ascorbic acid and EDTA have been shown to promote methionine oxidation in a number of proteins and peptides (Akers M J, and Defelippis M R. Peptides and Proteins as Parenteral Solutions. In: Pharmaceutical Formulation Development of Peptides and Proteins. Sven Frokjaer, Lars Hovgaard, editors. Pharmaceutical Science. Taylor and Francis, UK (1999)); Fransson J. R., J. Pharm. Sci. 86(9): 4046-1050 (1997); Yin J, et al., Pharm Res., 21(12): 2377-83 (2004)). Sodium thiosulfate has been reported to reduce the levels of light and temperature induced methionine-oxidation in rhuMab HER2; however, the formation of a thiosulfate-protein adduct was also reported in this study (Lam X M, Yang J Y, et al., J Pharm Sci. 86(11): 1250-5 (1997)). Selection of an appropriate antioxidant is made according to the specific stresses and sensitivities of the protein.

[0106] Metal Ions

[0107] In some embodiments, the pharmaceutical composition further comprises one or more metal ions. In general, transition metal ions are undesired in protein formulations because they can catalyze physical and chemical degradation reactions in proteins. However, specific metal ions are included in formulations when they are co-factors to proteins and in suspension formulations of proteins where they form coordination complexes (e.g., zinc suspension of insulin). Recently, the use of magnesium ions (10-120 mM) has been proposed to inhibit the isomerization of aspartic acid to isoaspartic acid (International Patent Publication No. WO 2004/039337).

[0108] Two examples where metal ions confer stability or increased activity in proteins are human deoxyribonuclease (rhDNase, Pulmozyme), and Factor VIII. In the case of rhDNase, Ca⁺² ions (up to 100 mM) increased the stability of the enzyme through a specific binding site (Chen B, et al., J Pharm Sci., 88(4): 477-82 (1999)). In fact, removal of calcium ions from the solution with EGTA caused an increase in deamidation and aggregation. However, this effect was observed only with Ca⁺² ions; other divalent cations—Mg⁺², Mn⁺² and Zn⁺² were observed to destabilize rhDNase. Similar effects were observed in Factor VIII. Ca⁺² and Sr⁺² ions stabilized the protein while others like Mg⁺², Mn⁺² and Zn⁺², Cu⁺² and Fe⁺² destabilized the enzyme (Fatouros, A., et al., Int. J. Pharm., 155, 121-131 (1997). In a separate study with Factor VIII, a significant increase in aggregation rate was observed in the presence of Al⁺³ ions (Derrick T S, et al., J. Pharm. Sci., 93(10): 2549-57 (2004)). The authors note that other excipients like buffer salts are often contaminated with Al⁺³ ions and illustrate the need to use excipients of appropriate quality in formulated products.

[0109] Preservatives

[0110] In some embodiments, the pharmaceutical composition further comprises one or more preservatives. Preservatives are necessary when developing multi-use parenteral formulations that involve more than one extraction from the same container. Their primary function is to inhibit microbial growth and ensure product sterility throughout the shelf-life or term of use of the drug product. Commonly used preservatives include phenol, benzyl alcohol, meta-cresol, alkyl parabens such as methyl paraben or propyl paraben, benzalkonium chloride, and benzethonium chloride. Other examples of compounds with antimicrobial preservative activity include octadecyldimethylbenzyl ammonium chloride, hexamethonium chloride. Other types of preservatives include aromatic alcohols such as butyl alcohol, phenol, benzyl alcohol; atechol, resorcinol, cyclohexanol, 3-pentanol. Although preservatives have a long history of use, the development of protein formulations that includes preservatives can be challenging. Preservatives almost always have a destabilizing effect (aggregation) on proteins, and this has become a major factor in limiting their use in multi-dose protein formulations (Roy S, et al., J Pharm Sci., 94(2): 382-96 (2005)).

[0111] Multi-use injection pen presentations include preserved formulations. For example, preserved formulations of hGH are currently available on the market. Norditropin® (liquid, Novo Nordisk), Nutropin AQ® (liquid, Genentech) & Genotropin (lyophilized—dual chamber cartridge, Pharmacia & Upjohn) contain phenol while Somatrope® (Eli Lilly) is formulated with m-cresol.

[0112] Several aspects are considered during the formulation development of preserved dosage forms. Optimization of preservative concentration involves testing a given preservative in the dosage form with concentration ranges that confer anti-microbial effectiveness without compromising protein stability. For example, three preservatives were successfully screened in the development of a liquid formulation for interleukin-1 receptor (Type I), using differential scanning calorimetry (DSC). The preservatives were rank ordered based on their impact on stability at concentrations commonly used in marketed products (Remmele R L Jr., et al., Pharm Res., 15(2): 200-8 (1998)).

[0113] Some preservatives can cause injection site reactions, which is another factor for consideration when choosing a preservative. In clinical trials that focused on the evaluation of preservatives and buffers in Norditropin, pain perception was observed to be lower in formulations containing phenol and benzyl alcohol as compared to a formulation containing m-cresol (Kappelgaard A. M., Horm Res. 62 Suppl 3:98-103 (2004)). Interestingly, among the commonly used preservative, benzyl alcohol possesses anesthetic properties (Minogue S C, and Sun D A., Anesth Analg., 100(3): 683-6 (2005)).

[0114] However, the disclosure also contemplates a pharmaceutical composition that does not comprise any preservatives.

[0115] Antigen-Binding Proteins

[0116] An “antigen-binding protein” is a protein comprising a portion that binds a specified target antigen (such as CD3 and/or CD38). An antigen-binding protein comprises a scaffold or framework portion that allows the antigen binding portion to adopt a conformation that promotes binding of the antigen-binding protein to the antigen. In exemplary aspects, the antigen-binding protein is an antibody or immunoglobulin, or an antigen-binding antibody fragment, or an antibody protein product.

[0117] The term “antibody” refers to an intact antigen-binding immunoglobulin. An “antibody” is a type of an antigen-binding protein. The antibody can be an IgA, IgD, IgE, IgG, or IgM antibody, including any one of IgG1, IgG2, IgG3 or IgG4. In various embodiments, an intact antibody comprises two full-length heavy chains and two full-length light chains. An antibody has a variable region and a constant region. In IgG formats, a variable region is generally about 100-110 or more amino acids, comprises three complementarity determining regions (CDRs), is primarily responsible for antigen recognition, and substantially varies among other antibodies that bind to different antigens. A variable region typically comprises at least three heavy or light chain CDRs (Kabat et al., 1991, Sequences of Proteins of Immunological Interest, Public Health Service N.I.H., Bethesda, Md.; see also Chothia and Lesk, 1987, J. Mol. Biol. 196:901-917; Chothia et al., 1989, Nature 342: 877-883), within a framework region (designated framework regions 1-4, FR1, FR2, FR3, and FR4, by Kabat et al., 1991; see also Chothia and Lesk, 1987, supra). The constant region allows the antibody to recruit cells and molecules of the immune system.

[0118] In various aspects, the antibody is a monoclonal antibody. In certain aspects, the antibody is a human antibody. In certain aspects, the antibody (or other antigen-binding protein) is chimeric or humanized. The term “chimeric” refers to an antibody containing domains from two or more different antibodies. A chimeric antibody can, for example, contain the constant domains from one species and the variable domains from a second, or more generally, can contain stretches of amino acid sequence from at least two species. Both “chimeric” and “humanized” often refer to antigen-binding proteins that combine regions from more than one species. A chimeric antibody also can contain domains of two or more different antibodies within the same species. In one embodiment, the chimeric antibody is a CDR grafted antibody.

[0119] The term “humanized” when used in relation to antigen-binding proteins refers to antigen-binding proteins (e.g., antibodies) having at least CDR region from a non-human source and which are engineered to have a structure and immunological function more similar to true human antibodies than the original source antibodies. For example, humanizing can involve grafting a CDR from a non-human antibody, such as a mouse antibody, into a human framework region. Generally, in a humanized antibody, the entire antibody, except the CDRs, is encoded by a polynucleotide of human origin or is identical to such an antibody except within its CDRs. The CDRs, some or all of which are encoded by nucleic acids originating in a non-human organism, are grafted into the beta-sheet framework of a human antibody variable region to create an antibody, the specificity of which is determined by the engrafted CDRs. The creation of such antibodies is described in, e.g., International Patent Publication No. WO 92/11018; Jones, 1986, Nature 321:522-525; and Verhoeyen et al., 1988, Science 239:1534-1536, all entirely incorporated by reference. “Back mutation” of selected acceptor framework residues to the corresponding donor residues is often employed to regain affinity that is lost in the initial grafted construct (See, e.g., U.S. Pat. Nos. 5,530,101; 5,585,089; 5,693,761; 5,693,762; 6,180,370; 5,859,205; 5,821,337; 6,054,297; and 6,407,213, all entirely incorporated by reference). The humanized antibody optimally also will comprise at least a portion of an immunoglobulin constant region, typically that of a human immunoglobulin, and thus will typically comprise a human Fc region.

[0120] Optionally, the antibody of the composition is a bispecific antibody, i.e., an antibody that binds two different targets (e.g., CD3 and a second, different target). In various aspects, the antibody of the composition is a heterodimeric antibody.

[0121] In some embodiments, the compositions described herein comprise a heterodimeric antibody comprising a first monomer comprising a first Fc domain and an anti-CD3 scFv. The heterodimeric antibody further comprises a second monomer comprising an anti-CD38 heavy variable domain and a heavy constant domain comprising a second Fc domain. The heterodimeric antibody also comprises light chain comprising a constant domain and an anti-CD38 variable light domain. Features of the monomers are further described below.

[0122] An scFv comprises a variable heavy chain, an scFv linker, and a variable light domain. Optionally, the C-terminus of the variable light chain is attached to the N-terminus of the scFv linker, the C-terminus of which is attached to the N-terminus of a variable heavy chain (N-vh-linker-vl-C), although the configuration can be switched (N-vl-linker-vh-C). Thus, specifically included in the depiction and description of scFvs are the scFvs in either orientation. In various aspects, the scFv domain linker is a charged linker. A number of suitable scFv linkers can be used and many are set forth in the Figures. Charged scFv linkers may be employed to facilitate the separation in pI between a first and a second monomer. That is, by incorporating a charged scFv linker, either positive or negative (or both, in the case of scaffolds that use scFvs on different monomers), this allows the monomer comprising the charged linker to alter the pI without making further changes in the Fc domains.

[0123] The scFv is covalently attached to the N-terminus of the Fc domain using a domain linker. A “domain linker” links any two domains as outlined herein together. If desired, charged domain linkers can be used. Charged domain linkers can, e.g., increase the pI separation of the monomers of the disclosure as well, and thus those included in the Figures can be used in any embodiment herein where a linker is utilized.

[0124] A linker peptide may predominantly include the following amino acid residues: Gly, Ser, Ala, or Thr. The linker peptide should have a length that is adequate to link two molecules in such a way that they assume the correct conformation relative to one another so that they retain the desired activity. In one embodiment, the linker is from about 1 to 50 amino acids in length, preferably about 1 to 30 amino acids in length. In one embodiment, linkers of 1 to 20 amino acids in length may be used, with from about 5 to about 10 amino acids finding use in some embodiments. Useful linkers include glycine-serine polymers, including for example (GS)n, (GSGGS)n (SEQ ID NO:332), (GGGGS)n (SEQ ID NO:333), and (GGGS)n (SEQ ID NO:334), where n is an integer of at least one (and generally from 3 to 4), glycine-alanine polymers, alanine-serine polymers, and other flexible linkers. Alternatively, a variety of nonproteinaceous polymers, including but not limited to polyethylene glycol (PEG), polypropylene glycol, polyoxyalkylenes, or copolymers of polyethylene glycol and polypropylene glycol, may find use as linkers.

[0125] Other linker sequences may include any sequence of any length of CL/CH1 domain but not all residues of CL/CH1 domain; for example the first 5-12 amino acid residues of the CL/CH1 domains. Linkers can be derived from immunoglobulin light chain, for example Cκ or Cλ. Linkers can be derived from immunoglobulin heavy chains of any isotype, including for example Cγ1, Cγ2, Cγ3, Cγ4, Cα1, Cα2, Cδ, Cε, and Cμ. Linker sequences may also be derived from other proteins such as Ig-like proteins (e.g., TCR, FcR, KIR), hinge region-derived sequences, and other natural sequences from other proteins.

[0126] The anti-CD3 scFv comprises (i) a scFv variable light domain comprising vlCDR1 as set forth in SEQ ID NO:15, vlCDR2 as set forth in SEQ ID NO:16, and vlCDR3 as set forth in SEQ ID NO:17, and (ii) a scFv variable heavy domain comprising vhCDR1 as set forth in SEQ ID NO:11, vhCDR2 as set forth in SEQ ID NO:12, and vhCDR3 as set forth in SEQ ID NO:13. Optionally, the anti-CD3 scFv comprises a variable heavy domain comprising an amino acid sequence at least 90% identical (e.g., 91%, 92%, 93%, 94%, 95%, 96%, 97%, 98%, 99%, or 100% identical) to the amino acid sequence set forth in SEQ ID NO: 10. Also optionally, the anti-CD3 scFv comprises a variable light domain comprising an amino acid sequence at least 90% identical (e.g., 91%, 92%, 93%, 94%, 95%, 96%, 97%, 98%, 99%, or 100% identical) to the amino acid sequence set forth in SEQ ID NO: 14. In this regard, the anti-CD3 scFv, in various embodiments, comprises a variable heavy domain of SEQ ID NO: 10 and a variable light domain of SEQ ID NO: 14. Optionally, the variable heavy and variable light domains are linked by an scFv domain linker comprising the sequence GKPGSGKPGSGKPGSGKPGS (SEQ ID NO: 158). In this regard, the anti-CD3 scFv comprises, in various embodiments, an amino acid sequence at least 90% identical (e.g., 91%, 92%, 93%, 94%, 95%, 96%, 97%, 98%, 99%, or 100% identical) to the amino acid sequence set forth in SEQ ID NO: 18 (scFv of Antibody A). In various aspects, the sequence variation giving rise to less than 100% percent identity to a reference sequence represents modifications outside the CDR sequences. In various aspects, the scFv comprises sequences set forth herein as belonging to Anti-CD3_H1.32_L1.47 (corresponding to Antibody A).

[0127] “Fc” or “Fc region” or “Fc domain” refers to the polypeptide comprising the constant region of an antibody excluding the first constant region immunoglobulin domain and in some cases, part of the hinge. Thus, “Fc domain” refers to the last two constant region immunoglobulin domains of IgA, IgD, and IgG, the last three constant region immunoglobulin domains of IgE and IgM, and the flexible hinge N-terminal to these domains. For IgA and IgM, Fc may include the J chain. For IgG, the Fc domain comprises immunoglobulin domains Cγ2 and Cγ3 (Cγ2 and Cγ3) and the lower hinge region between Cγ1 (Cγ1) and Cγ2 (Cγ2). The heterodimeric antibody is preferably an IgG antibody (which includes several subclasses, including, but not limited to IgG1, IgG2, IgG3, and IgG4). Although the boundaries of the Fc region may vary, the human IgG heavy chain Fc region is usually defined to include residues C226 or P230 to its carboxyl-terminus, wherein the numbering is according to the EU index as in Kabat. In some embodiments, amino acid modifications are made to the Fc region, for example, to alter binding to one or more FcγR receptors or to the FcRn receptor.

[0128] In various aspects, the first monomer (i.e., the first Fc domain and the anti-CD3 scFv) comprises an amino acid sequence at least 90% identical to the amino acid sequence set forth in SEQ ID NO:335 (e.g., 91%, 92%, 93%, 94%, 95%, 96%, 97%, 98%, 99%, or 100% identical to the amino acid sequence set forth in SEQ ID NO: 335 (corresponding to Antibody A)).

[0129] The heterodimeric antibody optionally further comprises a second monomer comprising i) an anti-CD38 heavy variable domain and ii) a heavy constant domain comprising a second Fc domain. The anti-CD38 heavy variable domain comprises the following CDR sequences: variable heavy (vh) CDR1 as set forth in SEQ ID NO:65, vhCDR2 as set forth in SEQ ID NO:66, and vhCDR3 as set forth in SEQ ID NO:67. Optionally, the anti-CD38 heavy variable domain comprises an amino acid sequence at least 90% identical to the amino acid sequence set forth in SEQ ID NO:64 (e.g., 91%, 92%, 93%, 94%, 95%, 96%, 97%, 98%, 99%, or 100% identical to the amino acid sequence set forth in SEQ ID NO: 64). In various aspects, the second monomer (i.e., the anti-CD38 heavy variable domain and heavy constant domain comprising a second Fc domain) comprises an amino acid sequence at least 90% identical to the amino acid sequence set forth in SEQ ID NO:82 (e.g., 91%, 92%, 93%, 94%, 95%, 96%, 97%, 98%, 99%, or 100% identical to the amino acid sequence set forth in SEQ ID NO: 82 (corresponding to Antibody A)).

[0130] In various aspects, the heterodimeric antibody further comprises a light chain comprising a constant domain and an anti-CD38 variable light (vl) domain. The anti-CD38 variable light domain comprises the following CDRs: vlCDR1 as set forth in SEQ ID NO:69, vlCDR2 as set forth in SEQ ID NO:70, and vlCDR3 as set forth in SEQ ID NO:71. Optionally, the anti-CD38 variable light domain comprises an amino acid sequence at least 90% identical to the amino acid sequence set forth in SEQ ID NO:68 (e.g., 91%, 92%, 93%, 94%, 95%, 96%, 97%, 98%, 99%, or 100% identical to the amino acid sequence set forth in SEQ ID NO: 68 (corresponding to Antibody A). In some embodiments, the light chain (comprising the constant domain and the anti-CD38 variable light domain) comprises an amino acid sequence at least 90% identical to the amino acid sequence set forth in SEQ ID NO:84 (e.g., 91%, 92%, 93%, 94%, 95%, 96%, 97%, 98%, 99%, or 100% identical to the amino acid sequence set forth in SEQ ID NO: 84 (corresponding to Antibody A)).

[0131] In a preferred embodiment, the heterodimeric antibody is Antibody A and comprises a first monomer comprising an anti-CD3 scFv comprising an anti-CD3 variable light domain comprising the amino acid sequence of SEQ ID NO: 14 and an anti-CD3 variable heavy domain comprising the amino acid sequence of SEQ ID NO: 10, a second monomer comprising an anti-CD38 variable heavy domain comprising the amino acid sequence of SEQ ID NO: 64, and a light chain comprising a variable light domain comprising the amino acid sequence of SEQ ID NO: 68. For example, in one embodiment, the heterodimeric antibody comprises a first monomer comprising the amino acid sequence of SEQ ID NO: 335, a second monomer comprising the amino acid sequence of SEQ ID NO: 82, and a light chain comprising the amino acid sequence of SEQ ID NO: 84.

[0132] In some embodiments, the compositions described herein comprise a heterodimeric antibody which binds CD3 and STEAP1. STEAP1 is a 339 amino acid protein comprising six transmembrane domains, resulting in three extracellular loops and two intracellular loops. The amino acid sequence of human STEAP1 is set forth herein as SEQ ID NO: 356. The estimated positions of the extracellular loops are amino acids 92-118 (extracellular loop 1), amino acids 185-217 (extracellular loop 2), and amino acids 279-290 (extracellular loop 3). STEAP1 is differentially expressed in prostate cancer compared to normal tissues, and increased expression in bone and lymph node prostate cancer metastatic lesions was observed compared to primary prostate cancer samples. STEAP1 represents an ideal target for diagnostics and antibody-based therapeutics, such as a bispecific anti-STEAP1/anti-CD3 T cell recruiting antibody to, e.g., trigger T cell dependent cellular cytotoxicity or redirected lysis of prostate cancer cells. The antigen-binding protein of the disclosure optionally binds STEAP1 in a region outside of the second extracellular loop. The antigen-binding protein, in at least one embodiment, binds a region of STEAP1 within amino acids 92-118 (extracellular loop 1) and/or amino acids 279-290 (extracellular loop 3). Also optionally, the antigen-binding protein does not bind STEAP2 (UniProtKB No. Q8NFT2; SEQ ID NO: 177). The disclosure provides a composition comprising an antigen-binding protein that binds STEAP1 and CD3 in any of the formats described herein, optionally in “bottle opener” in FIG. 1A or the Central-scFv format (also referred to as the “XmAb²⁺¹” format) in FIG. 1B.

[0133] In some embodiments, the compositions described herein comprise a heterodimeric antibody comprising a first monomer comprising a first Fc domain and an anti-CD3 scFv and further comprising a second monomer comprising an anti-STEAP1 heavy variable domain and a heavy constant domain comprising a second Fc domain. The heterodimeric antibody also comprises light chain comprising a constant domain and an anti-STEAP1 variable light domain. Exemplary aspects of monomers that constitute the scaffold are described above. In this embodiment, the heterodimeric antibody further comprises a second monomer comprising i) an anti-STEAP1 heavy variable domain and ii) a heavy constant domain comprising a second Fc domain. The anti-STEAP1 heavy variable domain optionally comprises variable heavy (vh) CDR1 as set forth in SEQ ID NO:360, vhCDR2 as set forth in SEQ ID NO:361 or SEQ ID NO: 363, and vhCDR3 as set forth in SEQ ID NO: 362. The anti-STEAP1 variable light domain of the light chain comprises vlCDR1 as set forth in SEQ ID NO: 357, vlCDR2 as set forth in SEQ ID NO: 358 and vlCDR3 as set forth in SEQ ID NO: 359. Alternatively, the anti-STEAP1 variable heavy domain comprises vhCDR1 as set forth in SEQ ID NO: 368, vhCDR2 as set forth in SEQ ID NO: 369, and vhCDR3 as set forth in SEQ ID NO: 370; and the variable light domain comprises vlCDR1 as set forth in SEQ ID NO: 371, vlCDR2 as set forth in SEQ ID NO: 372, and vlCDR3 as set forth in SEQ ID NO: 373.

[0134] Optionally, the anti-STEAP1 heavy variable domain comprises an amino acid sequence at least 90% identical to the amino acid sequence set forth in SEQ ID NO: 377 or SEQ ID NO: 379 (e.g., 91%, 92%, 93%, 94%, 95%, 96%, 97%, 98%, 99%, or 100% identical to the amino acid sequence set forth in SEQ ID NO: 377 or SEQ ID NO: 379). Optionally, the anti-STEAP1 variable light domain comprises an amino acid sequence at least 90% identical to the amino acid sequence set forth in SEQ ID NO: 378 (e.g., 91%, 92%, 93%, 94%, 95%, 96%, 97%, 98%, 99%, or 100% identical to the amino acid sequence set forth in SEQ ID NO: 378). In preferred embodiments, the anti-STEAP1 variable heavy domain comprises SEQ ID NO: 380 or SEQ ID NO: 379 and the anti-STEAP1 variable light domain comprises SEQ ID NO: 378.

[0135] Also optionally, the anti-STEAP1 heavy variable domain comprises an amino acid sequence at least 90% identical to the amino acid sequence set forth in SEQ ID NO: 380 (e.g., 91%, 92%, 93%, 94%, 95%, 96%, 97%, 98%, 99%, or 100% identical to the amino acid sequence set forth in SEQ ID NO: 380). Optionally, the anti-STEAP1 variable light domain comprises an amino acid sequence at least 90% identical to the amino acid sequence set forth in SEQ ID NO: 381 (e.g., 91%, 92%, 93%, 94%, 95%, 96%, 97%, 98%, 99%, or 100% identical to the amino acid sequence set forth in SEQ ID NO: 381). In preferred embodiments, the anti-STEAP1 variable heavy domain comprises SEQ ID NO: 380 and the anti-STEAP1 variable light domain comprises SEQ ID NO: 381.

[0136] In some embodiments, such as embodiments wherein the antigen-binding protein is a heterodimeric antibody that binds CD3 and STEAP1, and the CD3 binding domain (optionally an scFv as discussed above) comprises a variable heavy domain comprising heavy chain CDRs comprising vhCDR1 set forth in SEQ ID NO: 383, vhCDR2 set forth in SEQ ID NO: 384, and vhCDR3 set forth in SEQ ID NO: 385, and a variable light domain comprising light chain CDRs comprising vlCDR1 set forth in SEQ ID NO: 387, vlCDR2 set forth in SEQ ID NO: 388, and vlCDR3 set forth in SEQ ID NO: 389. For example, the disclosure provides compositions comprising a multispecific (e.g., bispecific) construct comprising an anti-CD3 variable heavy domain comprising an amino acid sequence at least 90% identical (e.g., 91%, 92%, 93%, 94%, 95%, 96%, 97%, 98%, 99%, or 100% identical) to SEQ ID NO:382 and/or an anti-CD3 variable light domain comprising an amino acid sequence at least 90% identical (e.g., 91%, 92%, 93%, 94%, 95%, 96%, 97%, 98%, 99%, or 100% identical) to SEQ ID NO:386. In various aspects, the heterodimeric antibody comprises an anti-CD3 scFv comprising SEQ ID NO: 390. scFvs are described in more detail above, and features of the scFv described above also apply here.

[0137] In various embodiments, the antigen-binding protein is a heterodimeric antibody in the Central-scFv or “XmAb²⁺¹” format shown in FIG. 1B. The format relies on the use of an inserted scFv domain forming a third antigen-binding domain, wherein the Fab portions of the two monomers bind one target and the “extra” scFv domain binds another. The scFv domain is inserted between the Fc domain and the CH1-Fv region of one of the monomers, thus providing the third antigen-binding domain. In this embodiment, one monomer comprises a first heavy chain comprising a first variable heavy domain, a CH1 domain (and optional linker/hinge) and Fe domain, with a scFv comprising a scFv variable light domain, an scFv linker and a scFv variable heavy domain. The scFv is covalently attached between the C-terminus of the CH1 domain of the heavy constant domain and the N-terminus of the first Fc domain using optional domain linkers (VH1-CH1-[optional domain linker]-VH2-scFv linker-VL2-[optional domain linker including the hinge]-CH2-CH3, or the opposite orientation for the scFv, VH1-CH1-[optional domain linker]-VL2-scFv linker-VH2-[optional domain linker including the hinge]-CH2-CH3). In some embodiments, the first monomer is VH1-CH1-domain linker-VH2-scFv linker-VL2-domain linker-CH2-CH3. The other monomer is a standard Fab side (i.e., VH1-CH1-domain linker (e.g., hinge)-CH2-CH3). This embodiment further utilizes a common light chain comprising a variable light domain and a constant light domain, which associates with the heavy chains to form two identical Fabs that bind a target. As for many of the embodiments herein, these constructs include skew variants, pI variants, ablation variants, additional Fc variants, etc. as desired and described herein and in in International Patent Publication No. WO 2017/21870.

[0138] In some aspects, the antigen-binding protein is a heterodimeric antibody in the “XmAb²⁺¹” format that binds CD3 and STEAP1, and the CD3 binding domain (optionally an scFv as discussed above) comprises a variable heavy domain comprising heavy chain CDRs comprising vhCDR1 set forth in SEQ ID NO: 383, vhCDR2 set forth in SEQ ID NO: 384, and vhCDR3 set forth in SEQ ID NO: 385, and a variable light domain comprising light chain CDRs comprising vlCDR1 set forth in SEQ ID NO: 387, vlCDR2 set forth in SEQ ID NO:388 and vlCDR3 set forth in SEQ ID NO: 389. For example, the construct optionally comprises an anti-CD3 variable heavy domain comprising an amino acid sequence at least 90% identical (e.g., 91%, 92%, 93%, 94%, 95%, 96%, 97%, 98%, 99%, or 100% identical) to SEQ ID NO:380 and/or an anti-CD3 variable light domain comprising an amino acid sequence at least 90% identical (e.g., 91%, 92%, 93%, 94%, 95%, 96%, 97%, 98%, 99%, or 100% identical) to SEQ ID NO:381. In various aspects, the scFv linker comprises the amino acid sequence of SEQ ID NO: 391. In various aspects, the heterodimeric antibody comprises an anti-CD3 scFv comprising SEQ ID NO: 390.

[0139] In various aspects, the antigen-binding protein is an XmAb²⁺¹ format heterodimeric antibody comprising two Fabs that bind STEAP1. In this regard, in some embodiments, the first variable heavy domain and the second variable heavy domain of the heterodimeric antibody comprise vhCDR1 set forth in SEQ ID NO: 360, vhCDR2 set forth in SEQ ID NO: 361 or SEQ ID NO: 363, and vhCDR3 set forth in SEQ ID NO: 362; and the variable light domain comprises vlCDR1 set forth in SEQ ID NO: 357, vlCDR2 set forth in SEQ ID NO: 358, and vlCDR3 set forth in SEQ ID NO: 359. Alternatively, the first variable heavy domain and the second variable heavy domain comprise vhCDR1 set forth in SEQ ID NO: 368, vhCDR2 set forth in SEQ ID NO: 369, and vhCDR3 set forth in SEQ ID NO: 370; and the variable light domain comprises vlCDR1 set forth in SEQ ID NO: 371, vlCDR2 set forth in SEQ ID NO: 372, and vlCDR3 set forth in SEQ ID NO: 373. In preferred embodiments, the first variable heavy domain and the second variable heavy domain comprise an amino acid sequence at least 90% identical (e.g., 91%, 92%, 93%, 94%, 95%, 96%, 97%, 98%, 99%, or 100% identical) to SEQ ID NO: 377 (corresponding to Antibody B) or SEQ ID NO: 379 and/or the variable light domain comprises an amino acid sequence at least 90% identical (e.g., 91%, 92%, 93%, 94%, 95%, 96%, 97%, 98%, 99%, or 100% identical) to SEQ ID NO: 378 (corresponding to Antibody B). Alternatively, the first variable heavy domain and the second variable heavy domain comprise an amino acid sequence at least 90% identical (e.g., 91%, 92%, 93%, 94%, 95%, 96%, 97%, 98%, 99%, or 100% identical) to SEQ ID NO: 380 and/or the variable light domain comprises an amino acid sequence at least 90% identical (e.g., 91%, 92%, 93%, 94%, 95%, 96%, 97%, 98%, 99%, or 100% identical) to SEQ ID NO: 381. As described above, variation in any variable domain sequence (or full length monomer sequence) described herein which results in less than 100% sequence identity compared to a reference sequence preferably occurs outside the CDR regions.

[0140] Thus, the disclosure provides a pharmaceutical composition comprising a heterodimeric antibody, which comprises (a) a first monomer comprising a first heavy chain comprising 1) a first variable heavy domain; 2) a first constant heavy chain comprising a first CH1 domain and a first Fc domain; and 3) a scFv that binds human CD3. The scFv comprises (i) a scFv variable light domain comprising vlCDR1 set forth in SEQ ID NO:387, vlCDR2 set forth in SEQ ID NO: 388, and vlCDR3 set forth in SEQ ID NO: 389, (ii) an scFv linker, and (iii) a scFv variable heavy domain comprising vhCDR1 set forth in SEQ ID NO: 383, vhCDR2 set forth in SEQ ID NO: 384, and vhCDR3 set forth in SEQ ID NO: 385. The scFv is covalently attached between the C-terminus of said CH1 domain and the N-terminus of said first Fc domain using domain linker(s). The heterodimeric antibody further comprises b) a second monomer comprising a second heavy chain comprising a second variable heavy domain and a second constant heavy chain comprising a second Fc domain and c) a common light chain comprising a variable light domain and a constant light domain; wherein the first variable heavy domain and the variable light domain bind human STEAP1, and the second variable heavy domain and the variable light domain bind human STEAP1. In some aspects, the first variable heavy domain and the second variable heavy domain comprises heavy chain CDRs comprising vhCDR1 set forth in SEQ ID NO: 360, vhCDR2 set forth in SEQ ID NO: 361 or SEQ ID NO: 363, and vhCDR3 set forth in SEQ ID NO: 362. The variable light domain optionally comprises light chain CDRs comprising vlCDR1 set forth in SEQ ID NO: 357, vlCDR2 set forth in SEQ ID NO: 358, and vlCDR3 set forth in SEQ ID NO: 359. Alternatively, the first variable heavy domain and the second variable heavy domain comprise heavy chain CDRs comprising vhCDR1 set forth in SEQ ID NO: 368, vhCDR2 set forth in SEQ ID NO: 369, and vhCDR3 set forth in SEQ ID NO: 370. The variable light domain optionally comprises light chain CDRs comprising vlCDR1 set forth in SEQ ID NO: 371, vlCDR2 set forth in SEQ ID NO: 372, and vlCDR3 set forth in SEQ ID NO: 373. Optionally, the first variable heavy domain and the second variable heavy domain comprise an amino acid sequence at least 90% identical (e.g., 91%, 92%, 93%, 94%, 95%, 96%, 97%, 98%, 99%, or 100% identical) to SEQ ID NO: 377 (corresponding to Antibody B) or 379 and/or the variable light domain comprises an amino acid sequence at least 90% identical (e.g., 91%, 92%, 93%, 94%, 95%, 96%, 97%, 98%, 99%, or 100% identical) to SEQ ID NO: 378 (corresponding to Antibody B). The scFv optionally comprises a variable heavy region and a variable light region of having amino acid sequences at least 90% identical (e.g., 91%, 92%, 93%, 94%, 95%, 96%, 97%, 98%, 99%, or 100% identical) to SEQ ID NO: 382 and SEQ ID NO: 386, respectively, and the scFv linker optionally comprises SEQ ID NO: 391. The scFv comprises the sequence of SEQ ID NO: 390, in various embodiments.

[0141] In various aspects of the disclosure, the anti-CD3/anti-STEAP1 antigen-binding protein is an XmAb²⁺¹ format heterodimeric antibody comprising a first monomer comprising an amino acid sequence at least 90% identical (e.g., 91%, 92%, 93%, 94%, 95%, 96%, 97%, 98%, 99%, or 100% identical) to SEQ ID NO: 366 or 367, a second monomer comprising an amino acid sequence at least 90% identical (e.g., 91%, 92%, 93%, 94%, 95%, 96%, 97%, 98%, 99%, or 100% identical) to SEQ ID NO: 365, and a common light chain comprising an amino acid sequence of at least 90% identical (e.g., 91%, 92%, 93%, 94%, 95%, 96%, 97%, 98%, 99%, or 100% identical) to SEQ ID NO: 364. In some embodiments, the anti-CD3/anti-STEAP1 antigen-binding protein is an XmAb²⁺¹ format heterodimeric antibody comprising a first monomer comprising an amino acid sequence at least 90% identical (e.g., 91%, 92%, 93%, 94%, 95%, 96%, 97%, 98%, 99%, or 100% identical) to SEQ ID NO: 366, a second monomer comprising an amino acid sequence at least 90% identical (e.g., 91%, 92%, 93%, 94%, 95%, 96%, 97%, 98%, 99%, or 100% identical) to SEQ ID NO: 365, and a common light chain comprising an amino acid sequence at least 90% identical (e.g., 91%, 92%, 93%, 94%, 95%, 96%, 97%, 98%, 99%, or 100% identical) to SEQ ID NO: 364 (corresponding to Antibody B). Alternatively, the anti-CD3/anti-STEAP1 antigen-binding protein is an XmAb²⁺¹ format heterodimeric antibody comprising a first monomer comprising an amino acid sequence at least 90% identical (e.g., 91%, 92%, 93%, 94%, 95%, 96%, 97%, 98%, 99%, or 100% identical) to SEQ ID NO: 376, a second monomer comprising an amino acid sequence at least 90% identical (e.g., 91%, 92%, 93%, 94%, 95%, 96%, 97%, 98%, 99%, or 100% identical) to SEQ ID NO: 375, and a common light chain comprising an amino acid sequence at least 90% identical (e.g., 91%, 92%, 93%, 94%, 95%, 96%, 97%, 98%, 99%, or 100% identical) to SEQ ID NO: 374.

[0142] In various aspects, the antigen-binding protein comprises a first heavy chain comprising VH1-CH1-[domain linker]-VH2-scFv linker-VL2-[domain linker (optionally including the hinge)]-CH2-CH3; a second heavy chain comprising a VH1-CH1-domain linker-CH2-CH3; and a common light chain comprising a VL1; wherein VH1 and VL1 bind STEAP1 and VH2 and VL2 bind CD3. In this format, VH2 optionally comprises CDR sequences of SEQ ID NO: 383 (CDR1), SEQ ID NO: 384 (CDR2), and SEQ ID NO: 385 (CDR3), while VL2 comprises CDR sequences of SEQ ID NO: 387 (CDR1), SEQ ID NO: 388 (CDR2), and SEQ ID NO:389 (CDR3). VH1 comprises CDR sequences of SEQ ID NO: 360 (CDR1), SEQ ID NO: 361 or 363 (CDR2), and SEQ ID NO: 362 (CDR3); and VL1 comprises CDR sequences of SEQ ID NO: 357 (CDR1), SEQ ID NO: 358 (CDR2), and SEQ ID NO: 359 (CDR3). Alternatively, VH1 comprises CDR sequences of SEQ ID NO: 368 (CDR1), SEQ ID NO: 369 (CDR2), and SEQ ID NO: 370 (CDR3); and VL1 comprises CDR sequences of SEQ ID NO: 371 (CDR1), SEQ ID NO: 372 (CDR2), and SEQ ID NO: 373 (CDR3). Optionally, the antigen-binding protein comprises modifications in the first heavy chain including, but not limited to, E233P, delL234, L235V, G236A, S267K, r292c, n297g, v302c, E357Q, and S364K (EU numbering, lower case letters referencing SEFL2 substitutions described further herein), and the second heavy chain comprises modifications including, but not limited to, N208D, E233P, delL234, L235V, G236A, S267K, r292c Q295E, n297g, v302c, L368D, K370S, N384D, Q418E, and N421D (EU numbering, lower case letters referencing SEFL2 substitutions described further herein). A linker for use in the context of this embodiment is optionally GKPGSGKPGSGKPGSGKPGS (SEQ ID NO: 391).

[0143] The Fc domains of the central scFv format optionally comprise skew variants (e.g., selected from the group consisting of S364K/E357Q: L368D/K370S; L368D/K370S: S364K; L368E/K370S: S364K; T411T/E360E/Q362E: D401K; L368D/K370S: S364K/E357L, K370S: S364K/E357Q, T366S/L368A/Y407V: T366W and T366S/L368A/Y407V/Y349C: T366W/S354C), optionally ablation variants, optionally charged scFv linkers, and the heavy chain comprises pI variants. In some embodiments, the central scFv format includes skew variants, pI variants, and ablation variants. Accordingly, some embodiments include formats that comprise: a) a first monomer that comprises the skew variants S364K/E357Q, the ablation variants E233P/L234V/L235A/G236del/S267K, and a first variable heavy domain that, with the first variable light domain of the light chain, makes up an Fv that binds to a first target, and a second variable heavy domain; b) a second monomer that comprises the skew variants L368D/K370S, the pI variants N208D/Q295E/N384D/Q418E/N421D, the ablation variants E233P/L234V/L235A/G236del/S267K, and a first variable heavy domain that, with the first variable light domain, makes up the Fv that binds to the first target, and a second variable light chain, that together with the second variable heavy chain forms an Fv that binds a second target; and c) a light chain comprising a first variable light domain and a constant light domain.

[0144] The different binding regions of a multispecific antigen-binding protein independently display a KD for their respective antigen (e.g., CD3 and STEAP1 or CD3 and CD38) of less than or equal to 10⁻⁴ M, less than or equal to 10⁻⁵ M, less than or equal to 10⁻⁶ M, less than or equal to 10⁻⁷ M, less than or equal to 10⁻⁸ M, less than or equal to 10⁻⁹ M, less than or equal to 10⁻¹⁰ M, less than or equal to 10⁻⁴ M, or less than or equal to 10⁻¹² M, or less than or equal to 10⁻¹³ M (e.g., 10⁻⁷ M to 10⁻¹² M), where KD refers to a dissociation rate of a particular antibody-antigen interaction. The STEAP1 binding region (or CD38 binding region) need not bind STEAP1 (or CD38) with the same affinity as, e.g., the CD3 binding region binds CD3.

[0145] In some embodiments, the formulation comprises an antigen-binding protein (e.g., antibody) described herein in an amount ranging from about 50 μg to about 200 mg (or from about 500 μg to about 150 mg, or from about 50 mg to about 200 mg, or about 50 mg to about 150 mg, or about 50 mg to about 100 mg, or about 50 mg to about 75 mg). In some embodiments, the formulation comprises an antibody in an amount of about 50 μg, about 100 μg, about 150 μg, about 200 μg, about 250 μg, about 300 μg, about 350 μg, about 400 μg, about 450 μg, about 500 μg, about 550 μg, about 600 μg, about 650 μg, about 700 μg, about 750 μg, about 800 μg, about 850 μg, about 900 μg, about 950 μg, about 1 mg, about 5 mg, about 10 mg, about 15 mg, about 20 mg, about 25 mg, about 30 mg, about 35 mg, about 40 mg, about 45 mg, about 50 mg, about 55 mg, about 60 mg, about 65 mg, about 70 mg, about 75 mg, about 80 mg, about 85 mg, about 90 mg, about 95, mg, about 100 mg, about 105 mg, about 110 mg, about 115 mg, about 120 mg, about 125 mg, about 130 mg, about 135 mg, about 140 mg, about 145 mg, about 150 mg, about 155 mg, about 160 mg, about 165 mg, about 170 mg, about 175 mg, about 180 mg, about 185 mg, about 190 mg, about 195 mg or about 200 mg.

[0146] In some embodiments, the formulation comprises an antigen-binding protein (e.g., antibody) in a concentration ranging from about 0.1 to about 20 mg/mL (or from about 0.5 to about 10 mg/mL, or from about 1 to about 10 mg/mL or from about 1 to about 20 mg/mL, or from about 10 to about 20 mg/mL). In some embodiments, the formulation comprises an antigen-binding protein (e.g., antibody, such as any of the heterodimeric antibodies described herein) in a concentration of about 0.1 mg/mL, about 0.5 mg/mL, about 1 mg/mL, about 2 mg/mL, about 3 mg/mL, about 4 mg/mL, about 5 mg/mL, about 6 mg/mL, about 7 mg/mL, about 8 mg/mL, about 9 mg/mL, about 10 mg/mL, about 11 mg/mL, about 12 mg/mL, about 13 mg/mL, about 14 mg/mL, about 15 mg/mL, about 16 mg/mL, about 17 mg/mL, about 18 mg/mL, about 19 mg/mL, or about 20 mg/mL.

[0147] In some embodiments, the formulation comprises an antigen-binding protein (e.g., antibody) in a concentration ranging from about 0.1 to about 8 mg/mL (or from about 0.5 to about 5 mg/mL or from about 1 to about 5 mg/mL, or from about 3 to about 6 mg/mL). In some embodiments, the formulation comprises an antigen-binding protein (e.g., antibody, such as any of the heterodimeric antibodies described herein) in a concentration of about 0.1 mg/mL, about 0.5 mg/mL, about 1 mg/mL, about 2 mg/mL, about 3 mg/mL, about 4 mg/mL, about 5 mg/mL, about 6 mg/mL, about 7 mg/mL, or about 8 mg/mL.

[0148] Heterodimeric antibody formats are further described in International Patent Publication No. WO 2017/218707, incorporated by reference herein in its entirety and particularly with respect to the figures and figure legends. In a preferred aspect, the heterodimeric antibody adopts the structure termed “bottle opener” in FIG. 1A. One heavy chain of the “bottle opener” format contains the scFv and the other heavy chain is a “regular” Fab format, comprising a traditional heavy chain and a light chain. The two heavy chains are brought together by the use of amino acid variants in the constant regions (e.g., the Fc domain, the CH1 domain and/or the hinge region) that promote the formation of heterodimeric antibodies. There are several distinct advantages to the “bottle opener” format. Antibody analogs relying on two scFv constructs often have stability and aggregation problems, which is alleviated in the present disclosure by the addition of a “regular” heavy and light chain pairing. In addition, as opposed to formats that rely on two heavy chains and two light chains, there is no issue with the incorrect pairing of heavy and light chains (e.g., heavy 1 pairing with light 2, etc.).

[0149] The heterodimeric antibody includes, in various aspects, modifications as compared wild-type antibody domain sequences to promote heterodimeric antibody formation (i.e., reduce homodimerization), adjust antibody functionality, etc. Modifications generally are focused in the Fc domain (although this is not required). Modifications are referenced by the amino acid position of the substitution, deletion, or insertion with respect to the native sequence. For example, N434S or 434S is an Fc domain substitution of serine at position 434 relative to the parent Fc polypeptide, wherein the numbering is according to the EU index. Likewise, M428L/N434S defines an Fc modification having substitutions M428L and N434S relative to the parent Fc polypeptide. The identity of the wild-type amino acid may be unspecified, in which case the aforementioned variant is referred to as 428L/434S. The order in which substitutions are provided is arbitrary, that is to say that, for example, 428L/434S is the same as M428L/N434S, and so on. For all positions discussed that relate to antibodies, unless otherwise noted, amino acid position numbering is according to the EU index. The EU index or EU index as in Kabat or EU numbering scheme refers to the numbering of the EU antibody (Edelman et al., 1969, Proc Natl Acad Sci USA 63:78-85, hereby entirely incorporated by reference). The modification can be an addition, deletion, or substitution. Substitutions can include naturally occurring amino acids and, in some cases, synthetic amino acids. Examples include U.S. Pat. No. 6,586,207; U.S. Patent Publication No. 2004-0214988A1; International Patent Publication Nos. WO 98/48032; WO 03/073238; WO 05/35727A2; WO 05/74524A2; WO 17/218707; J. W. Chin et al., (2002), Journal of the American Chemical Society 124:9026-9027; J. W. Chin, & P. G. Schultz, (2002), ChemBioChem 11:1135-1137; J. W. Chin, et al., (2002), PICAS United States of America 99:11020-11024; and, L. Wang, & P. G. Schultz, (2002), Chem. 1-10, all entirely incorporated by reference.

[0150] There are a number of mechanisms that can be used to generate the heterodimeric protein. Amino acid variants that lead to the production of heterodimers are referred to as “heterodimerization variants.” Heterodimerization variants can include steric variants (e.g., the “knobs and holes” or “skew” variants described below and the “charge pairs” variants described below) as well as “pI variants,” which allow purification of homodimers away from heterodimers. As is generally described in International Patent Publication No. WO 2014/145806 and WO 2017/218707, hereby incorporated by reference in their entirety and specifically for the discussion of “heterodimerization variants,” useful mechanisms for heterodimerization include “knobs and holes” (“KIH”; sometimes herein as “skew” variants), “electrostatic steering” or “charge pairs” as described in WO2014/145806, pI variants as described in WO2014/145806, and general additional Fc variants as outlined in WO2014/145806 and herein.

[0151] There are several basic mechanisms that can lead to ease of purifying heterodimeric antibodies; one relies on the use of pI variants, such that each monomer has a different pI, thus allowing the isoelectric purification of A-A, A-B and B-B dimeric proteins. Alternatively, some scaffold formats, such as the “bottle opener” format, also allows separation on the basis of size. It is also possible to “skew” the formation of heterodimers over homodimers. Thus, a combination of steric heterodimerization variants and pI or charge pair variants find particular use in the invention.

[0152] A. pI (Isoelectric Point) Variants

[0153] For pI variants, amino acid modifications can be introduced into one or both of the monomer polypeptides; that is, the pI of one of the monomers (referred to herein for simplicity as “monomer A”) can be engineered away from monomer B, or both monomer A and B can be changed, with the pI of monomer A increasing and the pI of monomer B decreasing. The pI changes of either or both monomers can be done by removing or adding a charged residue (e.g., a neutral amino acid is replaced by a positively or negatively charged amino acid residue, e.g., glycine to glutamic acid), changing a charged residue from positive or negative to the opposite charge (aspartic acid to lysine) or changing a charged residue to a neutral residue (e.g., loss of a charge; lysine to serine). A number of these variants are shown in the Figures. These modifications create a sufficient change in pI in at least one of the monomers such that heterodimers can be separated from homodimers. As will be appreciated by those in the art, this can be achieved by using a “wild type” heavy chain constant region and a variant region that has been engineered to either increase or decrease it's pI (wt A−+B or wt A−−B), or by increasing one region and decreasing the other region (A+−B− or A−B+).

[0154] Thus, in various aspects, the heterodimeric antibody comprises one or more modifications in the constant region(s) to alter the isoelectric point (pI) of at least one, if not both, of the monomers of a heterodimeric protein to form “pI antibodies” by incorporating amino acid substitutions (“pI variants” or “pI substitutions”) into one or both of the monomers. The separation of the heterodimers from the two homodimers can be accomplished if the pIs of the two monomers differ by as little as 0.1 pH unit, with 0.2, 0.3, 0.4 and 0.5 or greater all being suitable.

[0155] The number of pI variants to be included on each or both monomer(s) to achieve good separation will depend in part on the starting pI of the components, for example, the starting pI of the anti-CD3 scFv and anti-CD38 Fab. That is, to determine which monomer to engineer or in which “direction” (e.g. more positive or more negative), the Fv sequences of the two domains are calculated and a decision is made from there. Different Fvs will have different starting pIs which can be exploited. In some embodiments, the change in pI is calculated on the basis of the variant heavy chain constant domain, using the chart in the FIG. 19 of U.S. Patent Publication No. 2014/0370013. Alternatively, the pI of each monomer can be compared. In general, the pIs are engineered to result in a total pI difference of each monomer of at least about 0.1 logs, with 0.2 to 0.5 being preferred.

[0156] Preferred combinations of pI variants are shown in FIG. 10. These changes are shown relative to IgG1, but all isotypes can be altered this way, as well as isotype hybrids. In the case where the heavy chain constant domain is from IgG2-4, R133E and R133Q can also be used.

[0157] In one embodiment, the Fab monomer (the negative side) comprises the substitutions 208D/295E/384D/418E/421D (N208D/Q295E/N384D/Q418E/N421D (relative to human IgG1) and the scFv monomer (the positive side) comprises a positively charged scFv linker, including (GKPGS)₄.

[0158] Modifications to adjust pI also can be made in the light chain. Amino acid substitutions for lowering the pI of the light chain include, but are not limited to, K126E, K126Q, K145E, K145Q, N152D, S156E, K169E, S202E, K207E and adding peptide DEDE at the C-terminus of the light chain. Changes in this category based on the constant lambda light chain include one or more substitutions at R108Q, Q124E, K126Q, N138D, K145T and Q199E. In addition, increasing the pI of the light chains can also be done.

[0159] B. Skew/Steric Variants

[0160] There are a number of suitable pairs of sets of heterodimerization skew variants. These variants come in “pairs” of “sets.” That is, one set of the pair is incorporated into the first monomer and the other set of the pair is incorporated into the second monomer. It should be noted that these sets do not necessarily behave as “knobs in holes” variants, with a one-to-one correspondence between a residue on one monomer and a residue on the other; that is, these pairs of sets form an interface between the two monomers that encourages heterodimer formation and discourages homodimer formation, allowing the percentage of heterodimers that spontaneously form under biological conditions to be over 90%, rather than the expected 50% (25% homodimer A/A:50% heterodimer A/B:25% homodimer B/B).

[0161] In some embodiments, the formation of heterodimers is facilitated by the addition of steric variants. That is, by changing amino acids in each heavy chain, different heavy chains are more likely to associate to form the heterodimeric structure than to form homodimers with the same Fc amino acid sequences. Suitable examples of steric variants are included in FIG. 9.

[0162] One mechanism is generally referred to in the art as “knobs and holes,” referring to amino acid engineering that creates steric influences to favor heterodimeric formation and disfavor homodimeric formation, can also optionally be used. This is further described in U.S. Patent Publication No. 20130205756, Ridgway et al., Protein Engineering 9(7):617 (1996); Atwell et al., J. Mol. Biol. 1997 270:26; U.S. Pat. No. 8,216,805, all of which are hereby incorporated by reference in their entirety. The Figures identify a number of “monomer A-monomer B” pairs that rely on “knobs and holes.” In addition, as described in Merchant et al., Nature Biotech. 16:677 (1998), these “knobs and hole” mutations can be combined with disulfide bonds to skew formation to heterodimerization.

[0163] An additional mechanism that finds use in the generation of heterodimers is sometimes referred to as “electrostatic steering” as described in Gunasekaran et al., J. Biol. Chem. 285(25):19637 (2010), hereby incorporated by reference in its entirety. This is sometimes referred to herein as “charge pairs.” In this embodiment, electrostatics are used to skew the formation towards heterodimerization. As those in the art will appreciate, these may also have an effect on pI, and thus on purification, and thus could in some cases also be considered pI variants. However, as these were generated to force heterodimerization and were not used as purification tools, they are classified as “steric variants.” These include, but are not limited to, D221E/P228E/L368E paired with D221R/P228R/K409R (i.e., these are monomer corresponding sets) and C220E/P228E/368E paired with C220R/E224R/P228R/K409R.

[0164] Additional monomer A and monomer B variants that can be combined with other variants, optionally and independently in any amount, such as pI variants outlined herein or other steric variants that are shown in FIG. 37 of U.S. Patent Publication No. 2012/0149876, the figure and legend and SEQ ID NOs of which are incorporated expressly by reference herein.

[0165] In some embodiments, the steric variants outlined herein can be optionally and independently incorporated with any pI variant (or other variants such as Fc variants, FcRn variants, etc.) into one or both monomers, and can be independently and optionally included or excluded from the proteins of the invention.

[0166] A list of suitable skew variants is found in FIG. 9 and FIG. 12. Of particular use in many embodiments are the pairs of sets including, but not limited to, S364K/E357Q: L368D/K370S; L368D/K370S: S364K; L368E/K370S: S364K; T411T/E360E/Q362E: D401K; L368D/K370S: S364K/E357L and K370S: S364K/E357Q. In terms of nomenclature, the pair “S364K/E357Q: L368D/K370S” means that one of the monomers has the double variant set S364K/E357Q and the other has the double variant set L368D/K370S.

[0167] C. Additional Fc Variants for Adjusting Functionality

[0168] There are a number of useful Fc amino acid modification that can be made for a variety of reasons, including, but not limited to, altering binding to one or more FcγR receptors, altered binding to FcRn receptors, etc.

[0169] There are a number of useful Fc substitutions that can be made to alter binding to one or more of the FcγR receptors. Substitutions that result in increased binding as well as decreased binding can be useful. For example, it is known that increased binding to FcγRIIIa generally results in increased ADCC (antibody dependent cell-mediated cytotoxicity; the cell-mediated reaction wherein nonspecific cytotoxic cells that express FcγRs recognize bound antibody on a target cell and subsequently cause lysis of the target cell). Similarly, decreased binding to FcγRIIb (an inhibitory receptor) can be beneficial as well in some circumstances. Amino acid substitutions that find use in the present invention include those listed in U.S. Patent Publication Nos. 2006/0024298 (particularly FIG. 41), 2006/0121032, 2006/0235208, 2007/0148170, all of which are expressly incorporated herein by reference in their entirety and specifically for the variants disclosed therein. Particular variants that find use include, but are not limited to, 236A, 239D, 239E, 332E, 332D, 239D/332E, 267D, 267E, 328F, 267E/328F, 236A/332E, 239D/332E/330Y, 239D, 332E/330L, 243A, 243L, 264A, 264V and 299T.

[0170] In addition, there are additional Fc substitutions that find use in increased binding to the FcRn receptor and increased serum half life, as specifically disclosed in U.S. Patent Publication No. 2009/0163699, hereby incorporated by reference in its entirety, including, but not limited to, 434S, 434A, 428L, 308F, 259, 428L/434S, 259I/308F, 436I/428L, 436I or V/434S, 436V/428L and 259/308F/428L.

[0171] Another category of functional variants are “FcγR ablation variants” or “Fc knock out (FcKO or KO)” variants. For some therapeutic applications, it is desirable to reduce or remove the normal binding of the Fc domain to one or more or all of the Fc receptors (e.g., FcγR1, FcγRIIa, FcγRIIb, FcγRIIIa, etc.) to avoid additional mechanisms of action. That is, for example, particularly in the use of bispecific antibodies that bind CD3 monovalently, it may be desirable to ablate FcγRIIIa binding to eliminate or significantly reduce ADCC activity. Any level of reduction is contemplated (e.g., 50%, 60%, 70%, 80%, 90%, or 100% reduction in binding or activity). Examples of ablation variant modifications are depicted in FIG. 11, and each can be independently and optionally included or excluded, with preferred aspects utilizing ablation variants selected from the group consisting of G236R/L328R, E233P/L234V/L235A/G236del/S239K, E233P/L234V/L235A/G236del/S267K, E233P/L234V/L235A/G236del/S239K/A327G, E233P/L234V/L235A/G236del/S267K/A327G and E233P/L234V/L235A/G236del. It should be noted that the ablation variants referenced herein ablate FcγR binding but generally not FcRn binding.

[0172] D. Additional Antibody Considerations

[0173] The disclosure contemplates the use of other heterodimeric antibodies in formulations described herein. For example, the variable heavy and light sequences, as well as the scFv sequences (and Fab sequences comprising these variable heavy and light sequences) described above can be used in other formats, such as those depicted in FIG. 2 of International Patent Publication No. 2014/145806 or FIG. 1 of International Patent Publication No. 2017/218707, the Figures, formats and legend of which is expressly incorporated herein by reference, as well as FIGS. 1A and 1B. Further, the amino acid sequences (e.g., CDR sequences, variable light and variable heavy chain sequences, and/or full length heavy and light chain sequences) of CD3-binding regions and CD38-binding regions are provided in the sequence listing provided herewith and summarized in FIG. 21. Any combination of the sequences referenced in FIG. 21 are contemplated herein so long as the resulting heterodimeric antibody engages both CD3 and CD38. Anti-CD3/anti-CD38 antibodies are further described in reference International Patent Publication No. WO 2016/086196; U.S. Patent Publication No. 20160215063; International Patent Publication No. WO 2017/091656; and U.S. Pat. No. 9,822,186, which are incorporated by reference herein in their entirety and particularly with respect to the description of anti-CD3/anti-CD38 antibodies and their amino acid and nucleic acid sequences, sequence listing, and Figures.

[0174] With respect to CD3 binding, the heterodimeric antibody may comprise an anti-CD3 antigen binding domain that has an intermediate or “medium” affinity to CD3. In this regard, the heterodimeric antibody binds to CD3 with an affinity (KD) of about 15-50 nM (e.g., about 16-50 nM, 15-45 nM, about 20-40 nM, about 25-40 nM, or about 30-40 nM), optionally measured using the assays described in U.S. Patent Publication No. 20160215063 and International Patent Publication No. WO 2017/091656, incorporated by reference herein.

[0175] In another aspect, the heterodimeric antibody of the method comprises an anti-CD3 antigen binding domain that is a “strong” or “high affinity” binder to CD3 (e.g., one example are heavy and light variable domains depicted as H1.30_L1.47 (optionally including a charged linker as appropriate)). In various embodiments, the antibody construct binds to CD3 with an affinity (KD) of about 3-15 nM (e.g., 3-10 nM or 4-7 nM), optionally measured using the assays described in U.S. Patent Publication No. 20160215063 and International Patent Publication No. WO 2017/091656, incorporated by reference herein. In other embodiments, the method employs a heterodimeric antibody comprising an anti-CD3 antigen binding domain that is a “lite” or “lower affinity” binder to CD3. In this regard, the heterodimeric antibody optionally binds to CD3 with an affinity (KD) of about 51 nM or more (e.g., 51-100 nM), optionally measured using the assays described in in U.S. Patent Publication No. 20160215063 and International Patent Publication No. WO 2017/091656, incorporated by reference herein. The heterodimeric antibody also binds, e.g., CD38 or STEAP1.

[0176] The affinity for CD38 of a bispecific antibody also has an effect on the efficacy of the antibody in targeting cells expressing CD38. Bispecific antibodies having “medium” or “low” affinity for CD38 are able to efficiently kill target cells in vitro and in vivo with reduced toxicity profiles. In various embodiments, bispecific antibodies demonstrating “high” affinity for CD38 bind to CD38 with an affinity (KD), e.g., below 1 nM; bispecific antibodies demonstrating “medium” or “intermediate” affinity for CD38 bind CD38 with an affinity (KD) of about, e.g., 1-10 nM (e.g., 2-8 nM or 3-7 nM); bispecific antibodies demonstrating “low” or “lite” affinity for CD38 bind CD38 with an affinity (KD) of about, e.g., 11 nM or more (such as 11-100 nM), all optionally measured using the methods set forth in U.S. Patent Publication No. 20160215063 and International Patent Publication No. WO 2017/091656, incorporated by reference herein.

[0177] Generally, specific binding can be exhibited, for example, by an antibody having a KD for an antigen of at least about 10⁻⁴ M, at least about 10⁻⁵ M, at least about 10⁻⁶ M, at least about 10⁻⁷ M, at least about 10⁻⁸ M, at least about 10⁻⁹ M, alternatively at least about 10⁻¹ M, at least about 10⁻⁴ M, at least about 10⁻¹² M, or greater, where KD refers to a dissociation rate of a particular antibody-antigen interaction. Typically, an antibody that specifically binds an antigen will have a KD that is 20-, 50-, 100-, 500-, 1000-, 5,000-, 10,000- or more times greater for a control molecule relative to the antigen. Also, specific binding for a particular antigen can be exhibited, for example, by an antibody having a KA or Ka for an antigen or epitope of at least 20-, 50-, 100-, 500-, 1000-, 5,000-, 10,000- or more times greater for the antigen relative to a control, where KA or Ka refers to an association rate of a particular antibody-antigen interaction. It will be understand that disclosure relating to antibody also applies to antigen-binding protein.

[0178] Optionally, the heterodimeric antibody comprises a substitution of the cysteine at position 220 for serine; generally this is on the “scFv monomer” side of the heterodimeric antibody, although it can also be on the “Fab monomer” side, or both, to reduce disulfide formation. Specifically included within the sequences herein are one or both of these cysteines replaced (C220S).

[0179] E. Fragments

[0180] The disclosure also contemplates the use of antibody fragments (distinguished from a full length antibody which constitutes the natural biological form of an antibody, including variable and constant regions, which generally include Fab and Fc domains alongside optional extra antigen binding domains such as scFvs). The antibody fragment contains at least one constant domain which can be engineered to produce heterodimers, such as pI engineering. Other antibody fragments that can be used include fragments that contain one or more of the CH1, CH2, CH3, hinge and CL domains of the invention that have been pI engineered.

[0181] F. Chimeric/Humanized

[0182] The heterodimeric antibody can be a mixture from different species, e.g., a chimeric antibody and/or a humanized antibody. In general, both “chimeric antibodies” and “humanized antibodies” refer to antibodies that combine regions from more than one species. For example, “chimeric antibodies” traditionally comprise variable region(s) from a mouse (or rat, in some cases) and the constant region(s) from a human. “Humanized antibodies” generally refer to non-human antibodies that have had the variable-domain framework regions swapped for sequences found in human antibodies. Generally, in a humanized antibody, the entire antibody, except the CDRs, is encoded by a polynucleotide of human origin or is identical to such an antibody except within its CDRs. The CDRs, some or all of which are encoded by nucleic acids originating in a non-human organism, are grafted into the beta-sheet framework of a human antibody variable region to create an antibody, the specificity of which is determined by the engrafted CDRs. The creation of such antibodies is described in, e.g., International Patent Publication No. WO 92/11018, Jones, 1986, Nature 321:522-525, and Verhoeyen et al., 1988, Science 239:1534-1536, all entirely incorporated by reference. “Backmutation” of selected acceptor framework residues to the corresponding donor residues is often required to regain affinity that is lost in the initial grafted construct (U.S. Pat. Nos. 5,530,101; 5,585,089; 5,693,761; 5,693,762; 6,180,370; 5,859,205; 5,821,337; 6,054,297; and 6,407,213, all entirely incorporated by reference). The humanized antibody also may comprise at least a portion of an immunoglobulin constant region, typically that of a human immunoglobulin, and thus will typically comprise a human Fc region. Humanized antibodies can also be generated using mice with a genetically engineered immune system. Roque et al., 2004, Biotechnol. Prog. 20:639-654, entirely incorporated by reference. A variety of techniques and methods for humanizing and reshaping non-human antibodies are well known in the art (See Tsurushita & Vasquez, 2004, Humanization of Monoclonal Antibodies, Molecular Biology of B Cells, 533-545, Elsevier Science (USA), and references cited therein, all entirely incorporated by reference). Humanization methods include but are not limited to methods described in Jones et al., 1986, Nature 321:522-525; Riechmann et al., 1988; Nature 332:323-329; Verhoeyen et al., 1988, Science, 239:1534-1536; Queen et al., 1989, Proc Natl Acad Sci, USA 86:10029-33; He et al., 1998, J. Immunol. 160: 1029-1035; Carter et al., 1992, Proc Natl Acad Sci USA 89:4285-9, Presta et al., 1997, Cancer Res. 57(20):4593-9; Gorman et al., 1991, Proc. Natl. Acad. Sci. USA 88:4181-4185; O'Connor et al., 1998, Protein Eng 11:321-8, all entirely incorporated by reference. Humanization or other methods of reducing the immunogenicity of nonhuman antibody variable regions may include resurfacing methods, as described for example in Roguska et al., 1994, Proc. Natl. Acad. Sci. USA 91:969-973, entirely incorporated by reference.

[0183] Dosages

[0184] The term “effective dose” or “effective dosage” is defined as an amount sufficient to achieve or at least partially achieve the desired effect. The term “therapeutically effective dose” is defined as an amount sufficient to cure or at least partially arrest the disease and its complications in a patient already suffering from the disease. Amounts or doses effective for this use will depend on the condition to be treated (the indication), the delivered antibody construct, the therapeutic context and objectives, the severity of the disease, prior therapy, the patient's clinical history and response to the therapeutic agent, the route of administration, the size (body weight, body surface or organ size) and/or condition (the age and general health) of the patient, and the general state of the patient's own immune system. The proper dose can be adjusted according to the judgment of the attending physician such that it can be administered to the patient once or over a series of administrations, and in order to obtain the optimal therapeutic effect.

[0185] A therapeutic effective amount of an antigen-binding protein (e.g., antibody) preferably results in a decrease in severity of disease symptoms, an increase in frequency or duration of disease symptom-free periods or a prevention of impairment or disability due to the disease affliction. For treating target cell antigen-expressing tumors, a therapeutically effective amount of the antigen-binding protein (e.g., antibody), e.g., an anti-target cell antigen/anti-CD3 antibody construct, preferably inhibits cell growth or tumor growth by at least about 20%, at least about 40%, at least about 50%, at least about 60%, at least about 70%, at least about 80%, or at least about 90% relative to untreated patients. The ability of a molecule to inhibit tumor growth may be evaluated in an animal model predictive of efficacy.

[0186] The term “effective and non-toxic dose” refers to a tolerable dose of an antigen-binding protein (e.g., antibody) which is high enough to cause depletion of pathologic cells, tumor elimination, tumor shrinkage or stabilization of disease without or essentially without major toxic effects. Such effective and non-toxic doses may be determined, e.g., by dose escalation studies described in the art and should be below the dose inducing severe adverse side events (dose limiting toxicity, DLT).

[0187] The term “toxicity” as used herein refers to the toxic effects of a drug manifested in adverse events or severe adverse events. These side events might refer to a lack of tolerability of the drug in general and/or a lack of local tolerance after administration. Toxicity could also include teratogenic or carcinogenic effects caused by the drug.

[0188] The term “safety,” “in vivo safety” or “tolerability” defines the administration of a drug without inducing severe adverse events directly after administration (local tolerance) and during a longer period of application of the drug. “Safety,” “in vivo safety” or “tolerability” can be evaluated, e.g., at regular intervals during the treatment and follow-up period. Measurements include clinical evaluation, e.g., organ manifestations, and screening of laboratory abnormalities. Clinical evaluation may be carried out and deviations to normal findings recorded/coded according to NCI-CTC and/or MedDRA standards. Organ manifestations may include criteria such as allergy/immunology, blood/bone marrow, cardiac arrhythmia, coagulation and the like, as set forth, e.g., in the Common Terminology Criteria for adverse events v3.0 (CTCAE). Laboratory parameters which may be tested include for instance hematology, clinical chemistry, coagulation profile and urine analysis and examination of other body fluids such as serum, plasma, lymphoid or spinal fluid, liquor and the like. Safety can thus be assessed, e.g., by physical examination, imaging techniques (i.e., ultrasound, x-ray, CT scans, Magnetic Resonance Imaging (MRI)), other measures with technical devices (i.e. electrocardiogram), vital signs, by measuring laboratory parameters and recording adverse events. For example, adverse events in non-chimpanzee primates in the uses and methods according to the invention may be examined by histopathological and/or histochemical methods.

[0189] The above terms are also referred to e.g. in the Preclinical safety evaluation of biotechnology-derived pharmaceuticals S6; ICH Harmonised Tripartite Guideline; ICH Steering Committee meeting on Jul. 16, 1997.

[0190] A typical dosage may range from about 0.1 g/kg to up to about 30 mg/kg or more, depending on the factors mentioned above. In specific embodiments, the dosage may range from 1.0 g/kg up to about 20 mg/kg, optionally from 10 g/kg up to about 10 mg/kg or from 100 g/kg up to about 5 mg/kg. The formulation may be provided such that the heterodimeric antibody is provided in a unit dose, e.g., to achieve a dose in the range of 0.1-50 mg of antibody per kilogram of body weight (calculating the mass of the protein alone, without chemical modification).

[0191] Therapeutic Use of the Formulation

[0192] The formulations described herein are useful as pharmaceutical compositions in the treatment, amelioration and/or prevention of the pathological medical condition as described herein in a patient in need thereof. The term “treatment” refers to both therapeutic treatment and prophylactic or preventative measures. Treatment includes the application or administration of the formulation to the body, an isolated tissue, or cell from a patient who has a disease/disorder, a symptom of a disease/disorder, or a predisposition toward a disease/disorder, with the purpose to cure, heal, alleviate, relieve, alter, remedy, ameliorate, improve, or affect the disease, the symptom of the disease, or the predisposition toward the disease.

[0193] The term “amelioration” as used herein refers to any improvement of the disease state of a patient having a tumor or cancer or a metastatic cancer as specified herein below, by the administration of composition comprising an antigen-binding protein described herein to a subject in need thereof. Such an improvement may also be seen as a slowing or stopping of the progression of the tumor or cancer or metastatic cancer of the patient. The term “prevention” as used herein means the avoidance of the occurrence or re-occurrence of a patient having a tumor or cancer or a metastatic cancer as specified herein below, by the administration of the composition comprising an antigen-binding protein (i.e., antibody construct) described herein to a subject in need thereof.

[0194] In one embodiment the invention provides a method for the treatment or amelioration of a proliferative disease, a tumorous disease, a viral disease or an immunological disorder, comprising the step of administering to a subject in need thereof the formulation described herein. The term “disease” refers to any condition that would benefit from treatment with the pharmaceutical composition described herein. This includes chronic and acute disorders or diseases including those pathological conditions that predispose the mammal to the disease in question. The term “viral disease” describes diseases, which are the result of a viral infection of a subject. The term “immunological disorder” is used herein in line with the common definition of this term, which includes immunological disorders such as autoimmune diseases, hypersensitivities, immune deficiencies.

[0195] “Neoplasm” is an abnormal growth of tissue, usually but not always forming a mass. When also forming a mass, it is commonly referred to as a “tumor.” Neoplasms or tumors or can be benign, potentially malignant (pre-cancerous), or malignant. Malignant neoplasms are commonly called cancer. They usually invade and destroy the surrounding tissue and may form metastases, i.e., they spread to other parts, tissues or organs of the body. Hence, the term “metastatic cancer” encompasses metastases to other tissues or organs than the one of the original tumor. Lymphomas and leukemias are lymphoid neoplasms. For the purposes of the present invention, they are also encompassed by the terms “tumor” or “cancer.” The terms “subject in need” or those “in need of treatment” includes those already with the disorder, as well as those in which the disorder is to be prevented. The subject in need or “patient” includes human and other mammalian subjects that receive either prophylactic or therapeutic treatment.

[0196] Routes of Administration

[0197] Exemplary routes of administration include, but are not limited to topical routes (such as epicutaneous, inhalational, nasal, opthalmic, auricular/aural, vaginal, mucosal); enteral routes (such as oral, gastrointestinal, sublingual, sublabial, buccal, rectal); and parenteral routes (such as intravenous, intraarterial, intraosseous, intramuscular, intracerebral, intracerebroventricular, epidural, intrathecal, subcutaneous, intraperitoneal, extra-amniotic, intraarticular, intracardiac, intradermal, intralesional, intrauterine, intravesical, intravitreal, transdermal, intranasal, transmucosal, intrasynovial, intraluminal). Preferably, the pharmaceutical formulation is administered parenterally, e.g., intravenously, subcutaneously, or intramuscularly. Parenteral administration may be achieved by injection, such as bolus injection, or by infusion, such as continuous infusion. Administration may be achieved via depot for long-term release. In some embodiments, the formulation is administered intravenously by an initial bolus followed by a continuous infusion to maintain therapeutic circulating levels of drug product. In some embodiments, the formulation is administered as a one-time dose. Pharmaceutical compositions may be administered using a medical device. Examples of medical devices for administering pharmaceutical compositions are described in U.S. Pat. Nos. 4,475,196; 4,439,196; 4,447,224; 4,447, 233; 4,486,194; 4,487,603; 4,596,556; 4,790,824; 4,941,880; 5,064,413; 5,312,335; 5,312,335; 5,383,851; and 5,399,163.

[0198] In particular, the present invention provides for an uninterrupted administration of the suitable composition. As a non-limiting example, uninterrupted or substantially uninterrupted, i.e., continuous administration may be realized by a small pump system worn by the patient for metering the influx of therapeutic agent into the body of the patient. The pharmaceutical composition can be administered by using said pump systems. Such pump systems are generally known in the art, and commonly rely on periodic exchange of cartridges containing the therapeutic agent to be infused. When exchanging the cartridge in such a pump system, a temporary interruption of the otherwise uninterrupted flow of therapeutic agent into the body of the patient may ensue. In such a case, the phase of administration prior to cartridge replacement and the phase of administration following cartridge replacement would still be considered within the meaning of the pharmaceutical means and methods of the invention together make up one “uninterrupted administration” of such therapeutic agent.

[0199] The continuous or uninterrupted administration of the formulation may be intravenous or subcutaneous by way of a fluid delivery device or small pump system including a fluid driving mechanism for driving fluid out of a reservoir and an actuating mechanism for actuating the driving mechanism. Pump systems for subcutaneous administration may include a needle or a cannula for penetrating the skin of a patient and delivering the suitable composition into the patient's body. Said pump systems may be directly fixed or attached to the skin of the patient independently of a vein, artery or blood vessel, thereby allowing a direct contact between the pump system and the skin of the patient. The pump system can be attached to the skin of the patient for 24 hours up to several days. The pump system may be of small size with a reservoir for small volumes. As a non-limiting example, the volume of the reservoir for the suitable pharmaceutical composition to be administered can be between 0.1 and 50 ml.

[0200] The continuous administration may also be transdermal by way of a patch worn on the skin and replaced at intervals. One of skill in the art is aware of patch systems for drug delivery suitable for this purpose. It is of note that transdermal administration is especially amenable to uninterrupted administration, as exchange of a first exhausted patch can advantageously be accomplished simultaneously with the placement of a new, second patch, for example on the surface of the skin immediately adjacent to the first exhausted patch and immediately prior to removal of the first exhausted patch. Issues of flow interruption or power cell failure do not arise.

[0201] If the pharmaceutical composition has been lyophilized, the lyophilized material is first reconstituted in an appropriate liquid prior to administration. The lyophilized material may be reconstituted in, e.g., bacteriostatic water for injection (BWFI), physiological saline, phosphate buffered saline (PBS), or the same formulation the protein had been in prior to lyophilization. The pharmaceutical composition can be administered as a sole therapeutic or in combination with additional therapies such as anti-cancer therapies as needed, e.g. other proteinaceous and non-proteinaceous drugs. These drugs may be administered simultaneously with the composition of the invention as defined herein or separately before or after administration of said formulation in timely defined intervals and doses.

[0202] Kits

[0203] As an additional aspect, the described herein are kits which comprise one or more pharmaceutical compositions described herein packaged in a manner which facilitates their use for administration to subjects. In one embodiment, such a kit includes a formulation described herein (e.g., a composition comprising an antibody described therein), packaged in a container such as a sealed bottle, vessel, single-use or multi-use vial, prefilled syringe, or prefilled injection device, optionally with a label affixed to the container or included in the package that describes use of the compound or composition in practicing the method. In one aspect, the composition is packaged in a unit dosage form. The kit may further include a device suitable for administering the composition according to a specific route of administration. Preferably, the kit contains a label that describes use of an antibody described herein or formulation described herein.

[0204] The pharmaceutical compositions described herein can be formulated in various forms, e.g., in solid, liquid, frozen, gaseous or lyophilized form and may be, inter alia, in the form of an ointment, a cream, transdermal patches, a gel, powder, a tablet, solution, an aerosol, granules, pills, suspensions, emulsions, capsules, syrups, liquids, elixirs, extracts, tincture or fluid extracts.

[0205] Generally, various storage and/or dosage forms are conceivable for the pharmaceutical composition of the invention, depending, i.e., on the intended route of administration, delivery format and desired dosage (see, for example, Remington's Pharmaceutical Sciences, 22nd edition, Oslo, A., Ed., (2012)). The skilled person will be aware that such choice of a particular dosage form may for example influence the physical state, stability, rate of in vivo release and rate of in vivo clearance of an antibody.

[0206] For instance, the primary vehicle or carrier in a pharmaceutical composition may be either aqueous or non-aqueous in nature. A suitable vehicle or carrier may be water for injection, physiological saline solution or artificial cerebrospinal fluid, possibly supplemented with other materials common in compositions for parenteral administration. Neutral buffered saline or saline mixed with serum albumin are further exemplary vehicles.

### EXAMPLES

[0207] Materials and Methods

[0208] SE-UHPLC: Size Exclusion Ultra High Performance Liquid Chromatography is a method for quantitative analysis of recombinant monoclonal antibody (mAb) or X-mAb. SE-UHPLC separates proteins based on differences in their hydrodynamic volumes. Molecules with higher hydrodynamic volumes elute earlier than molecules with smaller volumes. The samples are loaded onto an SE-UHPLC column (BEH200, 4.6×300 mm, (Waters Corporation, 186005226)), separated isocratic ally and the eluent is monitored by UV absorbance. Purity is determined by calculating the percentage of each separated component as compared to the total integrated area. SE-UHPLC settings are as follows: Flow rate: 0.4 mL/min, Run time: 12 min, UV detection: 280 nm, Column temperature: Ambient, Target protein load: 6 μg, Protein compatible flow cell: 5 mm.

[0209] Cation Exchange High Performance Liquid Chromatography (CEX) is a method for quantitative purity analysis on the charged variant distribution. Mobile Phase A: 1x CX-1 pH gradient buffer A, pH 5.6 (10x CX-1 pH gradient buffer A, pH 5.6, 250 mL and Mobile Phase B: 1x CX-1 pH gradient buffer, pH 10.2.

[0210] CE-HPLC: Cation Exchange High Performance Liquid Chromatography is a method for quantitative purity analysis on the charged variant distribution. Mobile Phase A: 25 mM Sodium phosphate, 10% Acetonitrile, pH 6.7 and Mobile Phase B: 25 mM Sodium phosphate, 500 mM Sodium chloride, 10% Acetonitrile, pH 6.7. Column used for Antibody A CE-HPLC is a Bio Mab NP −5, 4.6×250 mm, 5 μm (Agilent Technology, 5190-2407). CE-HPLC method settings are as follows: Flow rate: 0.75 mL/min, Run time: 60 min, Column temperature set point: 30° C.±5° C., Detector wavelength: 280 nm, Target protein load: 20 μg. Column used for Antibody B CE-HPLC method is a YMC BioPro SP-F, 4.6×100 mm, 5 μm (YMC Co., Ltd., SF00S05-1046WP). CE-HPLC method settings are as follows: Flow rate: 1.0 mL/min, Run Time: 45 minutes, Autosampler temperature set point: 5±3C, Column temperature set point: 30±2° C., Detector wavelength: 280 nm, Target sample protein load: 70±10 ug.

[0211] rCE-SDS: Reduced Capillary Electrophoresis—Sodium Dodecyl Sulfate is a method for quantitative purity analysis under denaturing and reducing conditions.

[0212] MAM: Multi Attribute Method is a method for multiple product quality attributes (PQA) (oxidation, isomerization, deamidation and glycation) using the Thermo Scientific Orbitrap type Mass Spectrometer and Chromeleaon Software. Chemical modification upon heat stress (incubation at 40° C.) was measured using peptide mapping. Proteins were enzymatically digested and the resulting peptides were separated using reversed phased chromatography. Proteins are denatured with guanidine HCl and then reduced with dithiotreitol (DTT). After incubation in DTT, free cysteine residues were alkylated by the addition of iodoacetic acid. Samples were then buffer exchanged into 50 mM Tris-HCl, 20 mM Methionine, pH7.8 for digestion. Trypsin and Elastase was added to separate reaction tubes (enzyme to protein ratio 1:20). Samples were digested for 60 min at 37° C. and 30 min at 37° C. respectively. Digestion was quenched by adding Guanidine HCl, 250 mM Acetate, pH4.7.

[0213] Moisture content of lyophilized drug product is determined by a calorimetric titration with an oven. Moisture limit for lyophilized drug product is 2%. The Karl Fischer method's principle is based on the water content in the sample determined by means of calorimetric titration. Water is released by heating the sample in an oven. Dry air or inert gas such as nitrogen carried the evaporated moisture to the titrator. The amount of water present is determined by measuring the amount of coulombs (current/time) generated during the titration. When all the water has been consumed by titration, an excess of iodine occurs. The end point is indicated volumetrically by applying an alternating current of constant strength to a double Pt electrode. This results in a voltage difference between Pt wired of the indicator electrode, which is drastically lowered in the presence of minimal quantities of free iodine. This voltage difference is used to determine the end point of the titration.

### Example 1—Antibody Stability in Low pH Formulations

[0214] The following Example describes assays to verify the stability of a heterodimeric antibody described herein for up to 3 years at various different temperatures (4° C., 25° C., 40° C., −30° C. & −40° C.) in either a liquid formulation or a lyophilized formulation at different protein concentrations (i.e., 1 mg/mL and 5 mg/mL). The stability of the heterodimeric antibody was analyzed using the following assays: Appearance (via visual inspection of 20 vials at each time point), pH, Osmolality, CE-HPLC, rCE, MAM (Multi Attribute Method) and Karl Fischer (moisture content). The verification study samples were a 1.3 mL fill in 5 cc vials. Heterodimeric antibody DS (material without polysorbate 80) was at 10.6 mg/mL and was diluted with buffer (G42Su) to reach 5 mg/mL and 1 mg/mL. The formulations were isotonic in the G42SuT formulation with an osmolality value of 326 mOsm/kg.

[0215] Stability of the heterodimer antibody was assessed in the following formulations:

[0216] Formulation A: 1 mg/mL heterodimeric antibody lyophilized formulation in 10 mM L-Glutamic acid, 9% (w/v) Sucrose, 0.01% (w/v) Polysorbate 80, pH4.2;

[0217] Formulation B: 5 mg/mL heterodimeric antibody lyophilized formulation in 10 mM L-Glutamic acid, 9% (w/v) Sucrose, 0.01% (w/v) Polysorbate 80, pH4.2;

[0218] Formulation C: 5 mg/mL heterodimeric antibody liquid formulation in 10 mM L-Glutamic acid, 9% (w/v) Sucrose, 0.01% (w/v) Polysorbate 80, pH4.2; and

[0219] Formulation D: 1 mg/mL heterodimeric antibody liquid formulation in 10 mM Acetate, 9% (w/v) Sucrose, 0.01% Polysorbate 80, pH5.2).

[0220] Results:

[0221] Antibody A was determined to have a 13.4% main peak loss via SE-UHPLC after 3 months at 40° C. when formulated in Formulation C. See FIG. 23. By contrast, Antibody A was determined to have a 0.2% and 0.0% main peak loss via SE-UHPLC under the same conditions when formulated in Formulation A (FIG. 22A) and Formulation B (FIG. 22B), respectively. Antibody A was determined to have a 58.2% main peak loss via CE-HPLC after 3 months at 40° C. when formulated in Formulation C. See FIG. 25. By contrast, Antibody A was determined to have a 10.5% and 0.5% main peak loss via CE-HPLC under the same conditions when formulated in Formulation A (FIG. 24A) and Formulation B (FIG. 24B), respectively.

[0222] Antibody A showed a 2.9% main peak loss via rCE after three months at −30° C. when formulated in Formulation A (FIG. 26). Antibody A showed a 19.9% main peak loss via rCE after three months at 40° C. when formulated in Formulation C. See FIG. 28. However, Antibody A showed a 0.6% main peak loss via rCE after three months at 40° C. in Formulation A (FIG. 26), and a 0.0% main peak loss via rCE when formulated in Formulation B. See FIG. 27.

[0223] Antibody A showed 9.1% deamidation at N103 (CD3 scFv-FC) via MAM after three months at 40° C. when formulated in Formulation C. See FIG. 29, last column. By contrast, Antibody A showed 0.3% deamidation via MAM when formulated in Formulation B. See FIG. 29, second column from the right. Antibody A showed 13.8% deamidation at N103 (CD3 scFV-FC) via MAM after four weeks at 40° C. when formulated in Formulation D (see FIG. 30), and 3.7% deamidation at N103 (CD3 scFv-Fc) when formulated in Formulation C via MAM after one month at 40° C. See FIG. 31. By contrast, Antibody A showed 0.4% deamidation via MAM after one month at 40° C. when formulated in Formulation B. See FIG. 31.

[0224] The data provided herein demonstrates that that the lyophilized Formulation A and lyophilized Formulation B are more stable than the liquid Formulation C and liquid Formulation D due to high risk of deamidation in the liquid formulation.

### Example 2—Antibody Stability in Low pH Formulations

[0225] The following Example describes assays to verify the stability of a heterodimeric antibody described herein at various time points at various different temperatures (4° C., 25° C., 40° C., −30° C. & −40° C.) in liquid or lyophilized formulations at different protein concentrations (e.g., 1 mg/mL, 5 mg/mL and 20 mg/mL). Stability of the heterodimeric antibody was assessed in the following formulations:

[0226] Formulation E: 1 mg/mL heterodimeric antibody lyophilized formulation in 10 mM L-Glutamic acid, 9% (w/v) Sucrose, 0.01% (w/v) Polysorbate 80, pH4.2;

[0227] Formulation F: 5 mg/mL heterodimeric antibody lyophilized formulation in 10 mM L-Glutamic acid, 9% (w/v) Sucrose, 0.01% (w/v) Polysorbate 80, pH4.2;

[0228] Formulation G: 20 mg/mL heterodimeric antibody lyophilized formulation in 10 mM L-Glutamic acid, 9% (w/v) Sucrose, 0.01% (w/v) Polysorbate 80, pH4.2;

[0229] Formulation H: 1 mg/mL heterodimeric antibody liquid formulation in 10 mM L-Glutamic acid, 9% (w/v) Sucrose, 0.01% (w/v) Polysorbate 80, pH4.2;

[0230] Formulation I: 5 mg/mL heterodimeric antibody liquid formulation in 10 mM L-Glutamic acid, 9% (w/v) Sucrose, 0.01% (w/v) Polysorbate 80, pH4.2; and

[0231] Formulation J: 20 mg/mL heterodimeric antibody liquid formulation in 10 mM L-Glutamic acid, 9% (w/v) Sucrose, 0.01% (w/v) Polysorbate 80, pH4.2.

[0232] The stability of lyophilized Formulations E-G were compared to the stability of liquid liquid Formulations H-J.

[0233] The stability of the heterodimeric antibody was analyzed using the following assays: Appearance (via visual inspection of 20 vials at each time point), pH, Osmolality, CE-HPLC, rCE, MAM (Multi Attribute Method) and Karl Fischer (moisture content). The verification study samples were a 1.3 mL fill in 5 cc vials. Formulations E-G were isotonic with an osmolality value of 314 mOsm/kg and 311 mOsm/kg, respectively. No proteinaceous particles were observed in any of the formulations tested.

[0234] Stability of the heterodimer antibody was assessed in the following formulations:

[0235] Results:

[0236] Antibody A was determined to have a 34.7% main peak loss via CEX after 3 months at 40° C. when formulated in Formulation J. By contrast, Antibody A was determined to have a 2.8% main peak loss via CEX under the same conditions when formulated in Formulation G. See Table 2.

TABLE 2
% Main Peak of Formulations G and J as determined by CEX.

| Temperature | Time point | Formulation J | Formulation G |
|---|---|---|---|
| 40° C. | 0 | 74.8 | 74.4 |
| | 1 wk | 70.7 | 74.5 |
| | 2 wk | 67.4 | 73.6 |
| | 1 month | 68.4 | 74.8 |
| | 3 month | 40.1 | 71.6 |
| 25° C. | 0 | 74.8 | 74.4 |
| | 1 wk | 74.3 | N/A |
| | 2 wk | 74.0 | 75.5 |
| | 1 month | 73.2 | 75.2 |
| | 3 month | 68.7 | 74.3 |
| 4° C. | 0 | 74.8 | 74.4 |
| | 1 month | 74.9 | 75.1 |
| | 3 month | 75.2 | 73.8 |

[0237] Antibody A was determined to have a 15.3% main peak loss via SE-UHPLC after 3 months at 40° C. when formulated in Formulation J. By contrast, Antibody A was determined to have a 1.6% main peak loss via SE-UHPLC under the same conditions when formulated in Formulation G. See Table 3.

TABLE 3
% Main Peak of Formulations G and
J as determined by SE-UHPLC.

| Temperature | Time point | Formulation J | Formulation G |
|---|---|---|---|
| 40° C. | 0 | 98.6 | 98.6 |
| | 1 wk | 98.3 | 98.6 |
| | 2 wk | 98.4 | 99.1 |
| | 1 month | 97.4 | 99.1 |
| | 3 month | 83.3 | 97.0 |
| 25° C. | 0 | 98.6 | 98.6 |
| | 1 wk | 98.6 | N/A |
| | 2 wk | 98.9 | 99.0 |
| | 1 month | 99.8 | 99.1 |
| | 3 month | 95.9 | 97.0 |
| 4° C. | 0 | 98.6 | 98.6 |
| | 1 month | 99.1 | 99.1 |
| | 3 month | 97.0 | 97.1 |

[0238] Antibody A showed a 3.7% main peak loss via rCE after three months at 40° C. when formulated in Formulation J. However, Antibody A showed a 0.0% main peak loss via rCE after three months at 40° C. in Formulation G. See Table 4.

TABLE 4
% Main Peak of Formulations G and J as determined by rCE.

| Temperature | Time point | Formulation J | Formulation G |
|---|---|---|---|
| 40° C. | 0 | 99.7 | 99.7 |
| | 1 wk | 99.4 | 99.6 |
| | 1 month | 96.9 | 99.5 |
| | 3 month | 96.0 | 99.5 |
| 25° C. | 0 | 99.7 | 99.7 |
| | 1 wk | 99.6 | N/A |
| | 1 month | 99.2 | 99.5 |
| | 3 month | 98.8 | 99.5 |
| 4° C. | 0 | 99.7 | 99.7 |
| | 1 month | 99.5 | 99.5 |
| | 3 month | 99.4 | 99.4 |

[0239] Antibody A when formulated in Formulation G is expected to show the same % deamidation as Formulation B described above in Example 1.

[0240] The data provided herein demonstrates that the lyophilized Formulation G is more stable than the liquid Formulation J as demonstrated by a reduced % main peak loss observed in Formulation G at the tested time points. Also, it was determined that Formulation J, having a concentration of heterodimeric antibody concentration 20 mg/mL, was determined to have similar % main peak loss as Formulations A (heterodimeric antibody 1 mg/mL) and B (heterodimeric antibody 5 m/mL), which is surprising due to the higher heterodimeric antibody concentration present in Formulation J (20 mg/mL).

### Example 3—Antibody Stability in Low pH Formulations

[0241] The following Example describes assays to verify the stability of a heterodimeric antibody described herein for up to three years at various different temperatures (4° C., 25° C., 40° C., −30° C. & −40° C.) in liquid or lyophilized formulations at a protein concentration of 10 mg/mL. Stability of the heterodimeric antibody was assessed in the following formulations:

[0242] Formulation K: 10 mg/mL heterodimeric antibody lyophilized formulation in 10 mM L-Glutamic acid, 9% (w/v) Sucrose, 0.01% (w/v) Polysorbate 80, pH4.2; and

[0243] Formulation L: 10 mg/mL heterodimeric antibody liquid formulation in 10 mM L-Glutamic acid, 9% (w/v) Sucrose, 0.01% (w/v) Polysorbate 80, pH4.2.

[0244] The stability of lyophilized Formulation K was compared to the stability of liquid Formulation L Antibody B was utilized in this study.

[0245] The stability of the heterodimeric antibody was analyzed using the following assays: Appearance (via visual inspection of 20 vials at each time point), pH, Osmolality, SE-HPLC, rCE, MAM (Multi Attribute Method) and Karl Fischer (moisture content). The verification study samples were a 1.3 mL fill in 5 cc vials. Formulation K was isotonic with an osmolality value of 305 mOsm/kg. No proteinaceous particles were observed in any of the formulations tested.

[0246] Stability of the heterodimer antibody was assessed in the following formulations:

[0247] Results:

[0248] Antibody B was determined to have a 34.5% main peak loss via CEX after 3 months at 40° C. when formulated in Formulation L. By contrast, Antibody B was determined to have a 0.7% main peak loss via CEX under the same conditions when formulated in Formulation K. See Table 5.

TABLE 5
% Main Peak of Formulations K and L as determined by CEX.

| Temperature | Time point | Formulation L | Formulation K |
|---|---|---|---|
| 40° C. | 0 | 95.0 | 94.9 |
| | 1 wk | 91.6 | 94.6 |
| | 2 wk | 89.2 | 94.9 |
| | 1 month | 83.3 | 94.8 |
| | 3 months | 60.5 | 94.2 |
| 25° C. | 0 | 95.0 | 94.9 |
| | 1 wk | 94.7 | 94.7 |
| | 2 wk | 95.1 | 95.1 |
| | 1 month | 95.0 | 95.0 |
| | 3 months | 94.6 | 94.6 |
| 4° C. | 0 | 95.0 | 94.9 |
| | 1 wk | 94.7 | 94.8 |
| | 2 wk | 95.2 | 95.0 |
| | 1 month | 95.5 | 95.0 |
| | 3 months | 94.5 | 94.8 |
| −30° C. | 0 | 95.0 | 94.9 |
| | 1 wk | 94.8 | 94.7 |
| | 2 wk | 95.3 | 95.2 |
| | 1 month | 95.8 | 95.0 |
| | 3 months | 94.8 | 94.7 |

[0249] Antibody B was determined to have a22.5% main peak loss via SE-HPLC after 3 months at 40° C. when formulated in Formulation L. By contrast, Antibody B was determined to have a0.7% main peak loss via CEX under the same conditions when formulated in Formulation K. See Table 6 for SE-HPLC data.

TABLE 6
% Main Peak of Formulations K
and L as determined by SE-HPLC.

| Temperature | Time point | Formulation L | Formulation K |
|---|---|---|---|
| 40° C. | 0 | 98.8 | 98.8 |
| | 1 wk | 92.2 | 97.3 |
| | 2 wk | 92.6 | 98.5 |
| | 1 month | 91.7 | 98.7 |
| | 3 months | 76.3 | 97.1 |
| 25° C. | 0 | 98.8 | 98.8 |
| | 1 wk | 96.9 | 97.4 |
| | 2 wk | 96.7 | 98.6 |
| | 1 month | 98.7 | 98.7 |
| | 3 months | 97.2 | 97.2 |
| 4° C. | 0 | 98.8 | 98.8 |
| | 1 wk | 97.6 | 97.1 |
| | 2 wk | 97.9 | 98.6 |
| | 1 month | 98.5 | 98.7 |
| | 3 months | 96.7 | 97.0 |
| −30° C. | 0 | 98.8 | 98.8 |
| | 1 wk | 97.7 | 97.7 |
| | 2 wk | 98.0 | 98.0 |
| | 1 month | 98.7 | 98.7 |
| | 3 months | 96.8 | 97.5 |

[0250] Antibody B showed 6.8% deamidation via MAM after three months at 40° C. when formulated in Formulation L. See Table 7. By contrast, Antibody B showed <0.6% deamidation via MAM when formulated in Formulation K.

TABLE 7
% deamidation of Formulations K and L as determined by MAM.

| Temperature | Time point | Formulation L | Formulation K |
|---|---|---|---|
| 40° C. | 0 | <0.6% | <0.6% |
| | 1 month | 2.4% | <0.6% |
| | 3 months | 6.8% | <0.6% |
| 25° C. | 0 | <0.6% | <0.6% |
| | 1 month | <0.6% | <0.6% |
| | 3 months | 1.0% | <0.6% |
| 4° C. | 0 | <0.6% | <0.6% |
| | 1 month | <0.6% | <0.6% |
| | 3 months | <0.6% | <0.6% |
| −30° C. | 0 | <0.6% | <0.6% |
| | 1 month | <0.6% | <0.6% |
| | 3 months | <0.6% | <0.6% |

[0251] The data provided herein demonstrates that the lyophilized Formulation K is more stable than the liquid Formulation L due to high risk of deamidation in the liquid formulation.

The application's sequence listing, which the Patent Office published only in electronic form, follows.

SEQUENCE LISTING (391 sequences)

SEQ ID NO: 1 - protein, 125 aa, Artificial Sequence
  Variable heavy (vh) domain
EVQLVESGGGLVQPGGSLRLSCAASGFTFSTYAMNWVRQAPGKGLEWVGRIRSKYNNYATYYADSVKGRFTISRDDSKNTLYLQMNSLRAEDTAVYYCVRHGNFGDSYVSWFAYWGQGTLVTVSS

SEQ ID NO: 2 - protein, 5 aa, Artificial Sequence
  vhCDR1
TYAMN

SEQ ID NO: 3 - protein, 19 aa, Artificial Sequence
  vhCDR2
RIRSKYNNYATYYADSVKG

SEQ ID NO: 4 - protein, 14 aa, Artificial Sequence
  vhCDR3
HGNFGDSYVSWFAY

SEQ ID NO: 5 - protein, 109 aa, Artificial Sequence
  Variable light (vl) domain
QAVVTQEPSLTVSPGGTVTLTCGSSTGAVTTSNYANWVQQKPGKSPRGLIGGTNKRAPGVPARFSGSLLGGKAALTISGAQPEDEADYYCALWYSNHWVFGGGTKLTVL

SEQ ID NO: 6 - protein, 14 aa, Artificial Sequence
  vlCDR1
GSSTGAVTTSNYAN

SEQ ID NO: 7 - protein, 7 aa, Artificial Sequence
  vlCDR2
GTNKRAP

SEQ ID NO: 8 - protein, 9 aa, Artificial Sequence
  vlCDR3
ALWYSNHWV

SEQ ID NO: 9 - protein, 254 aa, Artificial Sequence
  scFv (including charged linker)
EVQLVESGGGLVQPGGSLRLSCAASGFTFSTYAMNWVRQAPGKGLEWVGRIRSKYNNYATYYADSVKGRFTISRDDSKNTLYLQMNSLRAEDTAVYYCVRHGNFGDSYVSWFAYWGQGTLVTVSSGKPGSGKPGSGKPGSGKPGSQAVVTQEPSLTVSPGGTVTLTCGSSTGAVTTSNYANWVQQKPGKSPRGLIGGTNKRAPGVPARFSGSLLGGKAALTISGAQPEDEADYYCALWYSNHWVFGGGTKLTVL

SEQ ID NO: 10 - protein, 125 aa, Artificial Sequence
  Variable heavy (vh) domain
EVQLVESGGGLVQPGGSLRLSCAASGFTFSTYAMNWVRQAPGKGLEWVGRIRSKANNYATYYADSVKGRFTISRDDSKNTLYLQMNSLRAEDTAVYYCVRHGNFGDSYVSWFAYWGQGTLVTVSS

SEQ ID NO: 11 - protein, 5 aa, Artificial Sequence
  vhCDR1
TYAMN

SEQ ID NO: 12 - protein, 19 aa, Artificial Sequence
  vhCDR2
RIRSKANNYATYYADSVKG

SEQ ID NO: 13 - protein, 14 aa, Artificial Sequence
  vhCDR3
HGNFGDSYVSWFAY

SEQ ID NO: 14 - protein, 109 aa, Artificial Sequence; identical to SEQ ID NO: 5
  Variable light (vl) domain

SEQ ID NO: 15 - protein, 14 aa, Artificial Sequence
  vlCDR1
GSSTGAVTTSNYAN

SEQ ID NO: 16 - protein, 7 aa, Artificial Sequence
  vlCDR2
GTNKRAP

SEQ ID NO: 17 - protein, 9 aa, Artificial Sequence
  vlCDR3
ALWYSNHWV

SEQ ID NO: 18 - protein, 254 aa, Artificial Sequence
  scFv (including charged linker)
EVQLVESGGGLVQPGGSLRLSCAASGFTFSTYAMNWVRQAPGKGLEWVGRIRSKANNYATYYADSVKGRFTISRDDSKNTLYLQMNSLRAEDTAVYYCVRHGNFGDSYVSWFAYWGQGTLVTVSSGKPGSGKPGSGKPGSGKPGSQAVVTQEPSLTVSPGGTVTLTCGSSTGAVTTSNYANWVQQKPGKSPRGLIGGTNKRAPGVPARFSGSLLGGKAALTISGAQPEDEADYYCALWYSNHWVFGGGTKLTVL

SEQ ID NO: 19 - protein, 125 aa, Artificial Sequence
  Variable heavy (vh) domain
EVQLVESGGGLVQPGGSLRLSCAASGFTFSTYAMNWVRQAPGKGLEWVGRIRSKYNNYATYYADSVKGRFTISRDDSKNTLYLQMNSLRAEDTAVYYCVRHGNFGDEYVSWFAYWGQGTLVTVSS

SEQ ID NO: 20 - protein, 5 aa, Artificial Sequence
  vhCDR1
TYAMN

SEQ ID NO: 21 - protein, 19 aa, Artificial Sequence
  vhCDR2
RIRSKYNNYATYYADSVKG

SEQ ID NO: 22 - protein, 14 aa, Artificial Sequence
  vhCDR3
HGNFGDEYVSWFAY

SEQ ID NO: 23 - protein, 109 aa, Artificial Sequence; identical to SEQ ID NO: 5
  Variable light (vl) domain

SEQ ID NO: 24 - protein, 14 aa, Artificial Sequence
  vlCDR1
GSSTGAVTTSNYAN

SEQ ID NO: 25 - protein, 7 aa, Artificial Sequence
  vlCDR2
GTNKRAP

SEQ ID NO: 26 - protein, 9 aa, Artificial Sequence
  vlCDR3
ALWYSNHWV

SEQ ID NO: 27 - protein, 254 aa, Artificial Sequence
  scFv (including charged linker)
EVQLVESGGGLVQPGGSLRLSCAASGFTFSTYAMNWVRQAPGKGLEWVGRIRSKYNNYATYYADSVKGRFTISRDDSKNTLYLQMNSLRAEDTAVYYCVRHGNFGDEYVSWFAYWGQGTLVTVSSGKPGSGKPGSGKPGSGKPGSQAVVTQEPSLTVSPGGTVTLTCGSSTGAVTTSNYANWVQQKPGKSPRGLIGGTNKRAPGVPARFSGSLLGGKAALTISGAQPEDEADYYCALWYSNHWVFGGGTKLTVL

SEQ ID NO: 28 - protein, 125 aa, Artificial Sequence
  Variable heavy (vh) domain
EVQLVESGGGLVQPGGSLRLSCAASGFTFSTYAMNWVRQAPGKGLEWVGRIRSKYNNYATYYADSVKGRFTISRDDSKNTLYLQMNSLRAEDTAVYYCVRHGNFGDPYVSWFAYWGQGTLVTVSS

SEQ ID NO: 29 - protein, 5 aa, Artificial Sequence
  vhCDR1
TYAMN

SEQ ID NO: 30 - protein, 19 aa, Artificial Sequence
  vhCDR2
RIRSKYNNYATYYADSVKG

SEQ ID NO: 31 - protein, 14 aa, Artificial Sequence
  vhCDR3
HGNFGDPYVSWFAY

SEQ ID NO: 32 - protein, 109 aa, Artificial Sequence; identical to SEQ ID NO: 5
  Variable light (vl) domain

SEQ ID NO: 33 - protein, 14 aa, Artificial Sequence
  vlCDR1
GSSTGAVTTSNYAN

SEQ ID NO: 34 - protein, 7 aa, Artificial Sequence
  vlCDR2
GTNKRAP

SEQ ID NO: 35 - protein, 9 aa, Artificial Sequence
  vlCDR3
ALWYSNHWV

SEQ ID NO: 36 - protein, 254 aa, Artificial Sequence
  scFv (including charged linker)
EVQLVESGGGLVQPGGSLRLSCAASGFTFSTYAMNWVRQAPGKGLEWVGRIRSKYNNYATYYADSVKGRFTISRDDSKNTLYLQMNSLRAEDTAVYYCVRHGNFGDPYVSWFAYWGQGTLVTVSSGKPGSGKPGSGKPGSGKPGSQAVVTQEPSLTVSPGGTVTLTCGSSTGAVTTSNYANWVQQKPGKSPRGLIGGTNKRAPGVPARFSGSLLGGKAALTISGAQPEDEADYYCALWYSNHWVFGGGTKLTVL

SEQ ID NO: 37 - protein, 125 aa, Artificial Sequence
  Variable heavy (vh) domain
EVQLVESGGGLVQPGGSLRLSCAASGFTFSTYAMNWVRQAPGKGLEWVGRIRSKYNNYATYYADSVKGRFTISRDDSKNTLYLQMNSLRAEDTAVYYCVRHGNFGDSYVSWFDYWGQGTLVTVSS

SEQ ID NO: 38 - protein, 5 aa, Artificial Sequence
  vhCDR1
TYAMN

SEQ ID NO: 39 - protein, 19 aa, Artificial Sequence
  vhCDR2
RIRSKYNNYATYYADSVKG

SEQ ID NO: 40 - protein, 14 aa, Artificial Sequence
  vhCDR3
HGNFGDSYVSWFDY

SEQ ID NO: 41 - protein, 109 aa, Artificial Sequence; identical to SEQ ID NO: 5
  Variable light (vl) domain

SEQ ID NO: 42 - protein, 14 aa, Artificial Sequence
  vlCDR1
GSSTGAVTTSNYAN

SEQ ID NO: 43 - protein, 7 aa, Artificial Sequence
  vlCDR2
GTNKRAP

SEQ ID NO: 44 - protein, 9 aa, Artificial Sequence
  vlCDR3
ALWYSNHWV

SEQ ID NO: 45 - protein, 254 aa, Artificial Sequence
  scFv (including charged linker)
EVQLVESGGGLVQPGGSLRLSCAASGFTFSTYAMNWVRQAPGKGLEWVGRIRSKYNNYATYYADSVKGRFTISRDDSKNTLYLQMNSLRAEDTAVYYCVRHGNFGDSYVSWFDYWGQGTLVTVSSGKPGSGKPGSGKPGSGKPGSQAVVTQEPSLTVSPGGTVTLTCGSSTGAVTTSNYANWVQQKPGKSPRGLIGGTNKRAPGVPARFSGSLLGGKAALTISGAQPEDEADYYCALWYSNHWVFGGGTKLTVL

SEQ ID NO: 46 - protein, 125 aa, Artificial Sequence
  Variable heavy (vh) domain
EVQLVESGGGLVQPGGSLRLSCAASGFTFSTYAMSWVRQAPGKGLEWVGRIRSKYNNYATYYADSVKGRFTISRDDSKNTLYLQMNSLRAEDTAVYYCVRHGNFGDSYVSWFAYWGQGTLVTVSS

SEQ ID NO: 47 - protein, 5 aa, Artificial Sequence
  vhCDR1
TYAMS

SEQ ID NO: 48 - protein, 19 aa, Artificial Sequence
  vhCDR2
RIRSKYNNYATYYADSVKG

SEQ ID NO: 49 - protein, 14 aa, Artificial Sequence
  vhCDR3
HGNFGDSYVSWFAY

SEQ ID NO: 50 - protein, 109 aa, Artificial Sequence; identical to SEQ ID NO: 5
  Variable light (vl) domain

SEQ ID NO: 51 - protein, 14 aa, Artificial Sequence
  vlCDR1
GSSTGAVTTSNYAN

SEQ ID NO: 52 - protein, 7 aa, Artificial Sequence
  vlCDR2
GTNKRAP

SEQ ID NO: 53 - protein, 9 aa, Artificial Sequence
  vlCDR3
ALWYSNHWV

SEQ ID NO: 54 - protein, 254 aa, Artificial Sequence
  scFv (including charged linker)
EVQLVESGGGLVQPGGSLRLSCAASGFTFSTYAMSWVRQAPGKGLEWVGRIRSKYNNYATYYADSVKGRFTISRDDSKNTLYLQMNSLRAEDTAVYYCVRHGNFGDSYVSWFAYWGQGTLVTVSSGKPGSGKPGSGKPGSGKPGSQAVVTQEPSLTVSPGGTVTLTCGSSTGAVTTSNYANWVQQKPGKSPRGLIGGTNKRAPGVPARFSGSLLGGKAALTISGAQPEDEADYYCALWYSNHWVFGGGTKLTVL

SEQ ID NO: 55 - protein, 116 aa, Artificial Sequence
  Variable heavy (vh) domain
EVQLVESGGGLVQPGGSLRLSCAASGFTFSYSWMNWVRQAPGKGLEWVSEINPQSSTINYATSVKGRFTISRDNSKNTLYLQMNSLRAEDTAVYYCARYGNWFPYWGQGTLVTVSS

SEQ ID NO: 56 - protein, 5 aa, Artificial Sequence
  vhCDR1
YSWMN

SEQ ID NO: 57 - protein, 17 aa, Artificial Sequence
  vhCDR2
EINPQSSTINYATSVKG

SEQ ID NO: 58 - protein, 7 aa, Artificial Sequence
  vhCDR3
YGNWFPY

SEQ ID NO: 59 - protein, 107 aa, Artificial Sequence
  Variable light (vl) domain
DIVMTQSPSSLSASVGDRVTITCRASQNVDTWVAWYQQKPGQSPKALIYSASYRYSGVPDRFTGSGSGTDFTLTISSLQPEDFATYFCQQYDSYPLTFGGGTKLEIK

SEQ ID NO: 60 - protein, 11 aa, Artificial Sequence
  vlCDR1
RASQNVDTWVA

SEQ ID NO: 61 - protein, 7 aa, Artificial Sequence
  vlCDR2
SASYRYS

SEQ ID NO: 62 - protein, 9 aa, Artificial Sequence
  vlCDR3
QQYDSYPLT

SEQ ID NO: 63 - protein, 243 aa, Artificial Sequence
  scFv (including charged linker)
EVQLVESGGGLVQPGGSLRLSCAASGFTFSYSWMNWVRQAPGKGLEWVSEINPQSSTINYATSVKGRFTISRDNSKNTLYLQMNSLRAEDTAVYYCARYGNWFPYWGQGTLVTVSSGKPGSGKPGSGKPGSGKPGSDIVMTQSPSSLSASVGDRVTITCRASQNVDTWVAWYQQKPGQSPKALIYSASYRYSGVPDRFTGSGSGTDFTLTISSLQPEDFATYFCQQYDSYPLTFGGGTKLEIK

SEQ ID NO: 64 - protein, 116 aa, Artificial Sequence
  Variable heavy (vh) domain
EVQLVESGGGLVQPGGSLRLSCAASGFDFSRSWMNWVRQAPGKGLEWVSEINPDSSTINYATSVKGRFTISRDNSKNTLYLQMNSLRAEDTAVYYCARYGNWFPYWGQGTLVTVSS

SEQ ID NO: 65 - protein, 5 aa, Artificial Sequence
  vhCDR1
RSWMN

SEQ ID NO: 66 - protein, 17 aa, Artificial Sequence
  vhCDR2
EINPDSSTINYATSVKG

SEQ ID NO: 67 - protein, 7 aa, Artificial Sequence
  vhCDR3
YGNWFPY

SEQ ID NO: 68 - protein, 107 aa, Artificial Sequence; identical to SEQ ID NO: 59
  Variable light (vl) domain

SEQ ID NO: 69 - protein, 11 aa, Artificial Sequence
  vlCDR1
RASQNVDTWVA

SEQ ID NO: 70 - protein, 7 aa, Artificial Sequence
  vlCDR2
SASYRYS

SEQ ID NO: 71 - protein, 9 aa, Artificial Sequence
  vlCDR3
QQYDSYPLT

SEQ ID NO: 72 - protein, 243 aa, Artificial Sequence
  scFv (including charged linker)
EVQLVESGGGLVQPGGSLRLSCAASGFDFSRSWMNWVRQAPGKGLEWVSEINPDSSTINYATSVKGRFTISRDNSKNTLYLQMNSLRAEDTAVYYCARYGNWFPYWGQGTLVTVSSGKPGSGKPGSGKPGSGKPGSDIVMTQSPSSLSASVGDRVTITCRASQNVDTWVAWYQQKPGQSPKALIYSASYRYSGVPDRFTGSGSGTDFTLTISSLQPEDFATYFCQQYDSYPLTFGGGTKLEIK

SEQ ID NO: 73 - protein, 116 aa, Artificial Sequence; identical to SEQ ID NO: 64
  Variable heavy (vh) domain

SEQ ID NO: 74 - protein, 5 aa, Artificial Sequence
  vhCDR1
RSWMN

SEQ ID NO: 75 - protein, 17 aa, Artificial Sequence
  vhCDR2
EINPDSSTINYATSVKG

SEQ ID NO: 76 - protein, 7 aa, Artificial Sequence
  vhCDR3
YGNWFPY

SEQ ID NO: 77 - protein, 116 aa, Artificial Sequence; identical to SEQ ID NO: 64
  Variable light (vl) domain

SEQ ID NO: 78 - protein, 11 aa, Artificial Sequence
  vlCDR1
RASQNVDTNVA

SEQ ID NO: 79 - protein, 7 aa, Artificial Sequence
  vlCDR2
SASYRYS

SEQ ID NO: 80 - protein, 9 aa, Artificial Sequence
  vlCDR3
QQYDSYPLT

SEQ ID NO: 81 - protein, 252 aa, Artificial Sequence
  scFv (including charged linker)
EVQLVESGGGLVQPGGSLRLSCAASGFDFSRSWMNWVRQAPGKGLEWVSEINPDSSTINYATSVKGRFTISRDNSKNTLYLQMNSLRAEDTAVYYCARYGNWFPYWGQGTLVTVSSGKPGSGKPGSGKPGSGKPGSEVQLVESGGGLVQPGGSLRLSCAASGFDFSRSWMNWVRQAPGKGLEWVSEINPDSSTINYATSVKGRFTISRDNSKNTLYLQMNSLRAEDTAVYYCARYGNWFPYWGQGTLVTVSS

SEQ ID NO: 82 - protein, 445 aa, Artificial Sequence
  XENP13551 HC-Fab
EVQLVESGGGLVQPGGSLRLSCAASGFTFSYSWMNWVRQAPGKGLEWVSEINPQSSTINYATSVKGRFTISRDNSKNTLYLQMNSLRAEDTAVYYCARYGNWFPYWGQGTLVTVSSASTKGPSVFPLAPSSKSTSGGTAALGCLVKDYFPEPVTVSWNSGALTSGVHTFPAVLQSSGLYSLSSVVTVPSSSLGTQTYICNVNHKPSDTKVDKKVEPKSCDKTHTCPPCPAPPVAGPSVFLFPPKPKDTLMISRTPEVTCVVVDVKHEDPEVKFNWYVDGVEVHNAKTKPREEEYNSTYRVVSVLTVLHQDWLNGKEYKCKVSNKALPAPIEKTISKAKGQPREPQVYTLPPSREEMTKNQVSLTCDVSGFYPSDIAVEWESDGQPENNYKTTPPVLDSDGSFFLYSKLTVDKSRWEQGDVFSCSVMHEALHNHYTQKSLSLSPGK

SEQ ID NO: 83 - protein, 485 aa, Artificial Sequence
  XENP13551 HC-scFv
EVQLVESGGGLVQPGGSLRLSCAASGFTFSTYAMNWVRQAPGKGLEWVGRIRSKYNNYATYYADSVKGRFTISRDDSKNTLYLQMNSLRAEDTAVYYCVRHGNFGDSYVSWFAYWGQGTLVTVSSGKPGSGKPGSGKPGSGKPGSQAVVTQEPSLTVSPGGTVTLTCGSSTGAVTTSNYANWVQQKPGKSPRGLIGGTNKRAPGVPARFSGSLLGGKAALTISGAQPEDEADYYCALWYSNHWVFGGGTKLTVLEPKSSDKTHTCPPCPAPPVAGPSVFLFPPKPKDTLMISRTPEVTCVVVDVKHEDPEVKFNWYVDGVEVHNAKTKPREEQYNSTYRVVSVLTVLHQDWLNGKEYKCKVSNKALPAPIEKTISKAKGQPREPQVYTLPPSREQMTKNQVKLTCLVKGFYPSDIAVEWESNGQPENNYKTTPPVLDSDGSFFLYSKLTVDKSRWQQGNVFSCSVMHEALHNHYTQKSLSLSPGK

SEQ ID NO: 84 - protein, 214 aa, Artificial Sequence
  XENP13551 LC
DIVMTQSPSSLSASVGDRVTITCRASQNVDTWVAWYQQKPGQSPKALIYSASYRYSGVPDRFTGSGSGTDFTLTISSLQPEDFATYFCQQYDSYPLTFGGGTKLEIKRTVAAPSVFIFPPSDEQLKSGTASVVCLLNNFYPREAKVQWKVDNALQSGNSQESVTEQDSKDSTYSLSSTLTLSKADYEKHKVYACEVTHQGLSSPVTKSFNRGEC

SEQ ID NO: 85 - protein, 445 aa, Artificial Sequence
  XENP13243 HC-Fab
EVQLVESGGGLVQPGGSLRLSCAASGFDFSRSWMNWVRQAPGKGLEWVSEINPDSSTINYATSVKGRFTISRDNSKNTLYLQMNSLRAEDTAVYYCARYGNWFPYWGQGTLVTVSSASTKGPSVFPLAPSSKSTSGGTAALGCLVKDYFPEPVTVSWNSGALTSGVHTFPAVLQSSGLYSLSSVVTVPSSSLGTQTYICNVNHKPSDTKVDKKVEPKSCDKTHTCPPCPAPPVAGPSVFLFPPKPKDTLMISRTPEVTCVVVDVKHEDPEVKFNWYVDGVEVHNAKTKPREEEYNSTYRVVSVLTVLHQDWLNGKEYKCKVSNKALPAPIEKTISKAKGQPREPQVYTLPPSREEMTKNQVSLTCDVSGFYPSDIAVEWESDGQPENNYKTTPPVLDSDGSFFLYSKLTVDKSRWEQGDVFSCSVMHEALHNHYTQKSLSLSPGK

SEQ ID NO: 86 - protein, 485 aa, Artificial Sequence; identical to SEQ ID NO: 83
  XENP13243 HC-scFv

SEQ ID NO: 87 - protein, 214 aa, Artificial Sequence
  XENP13243 LC
DIVMTQSPSSLSASVGDRVTITCRASQNVDTNVAWYQQKPGQSPKALIYSASYRYSGVPDRFTGSGSGTDFTLTISSLQPEDFATYFCQQYDSYPLTFGGGTKLEIKRTVAAPSVFIFPPSDEQLKSGTASVVCLLNNFYPREAKVQWKVDNALQSGNSQESVTEQDSKDSTYSLSSTLTLSKADYEKHKVYACEVTHQGLSSPVTKSFNRGEC

SEQ ID NO: 88 - protein, 445 aa, Artificial Sequence; identical to SEQ ID NO: 82
  XENP14702 Anti-CD38

SEQ ID NO: 89 - protein, 485 aa, Artificial Sequence
  XENP14702 Anti-CD38
EVQLVESGGGLVQPGGSLRLSCAASGFTFSTYAMSWVRQAPGKGLEWVGRIRSKYNNYATYYADSVKGRFTISRDDSKNTLYLQMNSLRAEDTAVYYCVRHGNFGDSYVSWFAYWGQGTLVTVSSGKPGSGKPGSGKPGSGKPGSQAVVTQEPSLTVSPGGTVTLTCGSSTGAVTTSNYANWVQQKPGKSPRGLIGGTNKRAPGVPARFSGSLLGGKAALTISGAQPEDEADYYCALWYSNHWVFGGGTKLTVLEPKSSDKTHTCPPCPAPPVAGPSVFLFPPKPKDTLMISRTPEVTCVVVDVKHEDPEVKFNWYVDGVEVHNAKTKPREEQYNSTYRVVSVLTVLHQDWLNGKEYKCKVSNKALPAPIEKTISKAKGQPREPQVYTLPPSREQMTKNQVKLTCLVKGFYPSDIAVEWESNGQPENNYKTTPPVLDSDGSFFLYSKLTVDKSRWQQGNVFSCSVMHEALHNHYTQKSLSLSPGK

SEQ ID NO: 90 - protein, 214 aa, Artificial Sequence; identical to SEQ ID NO: 84
  XENP14702 Anti-CD38

SEQ ID NO: 91 - protein, 445 aa, Artificial Sequence; identical to SEQ ID NO: 82
  XENP15426 Anti-CD38

SEQ ID NO: 92 - protein, 485 aa, Artificial Sequence
  XENP15426 Anti-CD38
EVQLVESGGGLVQPGGSLRLSCAASGFTFSTYAMNWVRQAPGKGLEWVGRIRSKYNNYATYYADSVKGRFTISRDDSKNTLYLQMNSLRAEDTAVYYCVRHGNFGDSYVSWFDYWGQGTLVTVSSGKPGSGKPGSGKPGSGKPGSQAVVTQEPSLTVSPGGTVTLTCGSSTGAVTTSNYANWVQQKPGKSPRGLIGGTNKRAPGVPARFSGSLLGGKAALTISGAQPEDEADYYCALWYSNHWVFGGGTKLTVLEPKSSDKTHTCPPCPAPPVAGPSVFLFPPKPKDTLMISRTPEVTCVVVDVKHEDPEVKFNWYVDGVEVHNAKTKPREEQYNSTYRVVSVLTVLHQDWLNGKEYKCKVSNKALPAPIEKTISKAKGQPREPQVYTLPPSREQMTKNQVKLTCLVKGFYPSDIAVEWESNGQPENNYKTTPPVLDSDGSFFLYSKLTVDKSRWQQGNVFSCSVMHEALHNHYTQKSLSLSPGK

SEQ ID NO: 93 - protein, 214 aa, Artificial Sequence; identical to SEQ ID NO: 84
  XENP15426 Anti-CD38

SEQ ID NO: 94 - protein, 445 aa, Artificial Sequence; identical to SEQ ID NO: 85
  XENP14701 Anti-CD38

SEQ ID NO: 95 - protein, 485 aa, Artificial Sequence; identical to SEQ ID NO: 89
  XENP14701 Anti-CD38

SEQ ID NO: 96 - protein, 214 aa, Artificial Sequence; identical to SEQ ID NO: 87
  XENP14701 Anti-CD38

SEQ ID NO: 97 - protein, 445 aa, Artificial Sequence; identical to SEQ ID NO: 85
  XENP14703 Heavy Chain 1

SEQ ID NO: 98 - protein, 485 aa, Artificial Sequence; identical to SEQ ID NO: 89
  XENP14703 Heavy Chain 2

SEQ ID NO: 99 - protein, 214 aa, Artificial Sequence
  XENP14703 Light Chain
DIVMTQSPSSLSASVGDRVTITCRASQNVDTNVAWYQQKPGQSPKALIYSASYRKSGVPDRFTGSGSGTDFTLTISSLQPEDFATYFCQQYDSYPLTFGGGTKLEIKRTVAAPSVFIFPPSDEQLKSGTASVVCLLNNFYPREAKVQWKVDNALQSGNSQESVTEQDSKDSTYSLSSTLTLSKADYEKHKVYACEVTHQGLSSPVTKSFNRGEC

SEQ ID NO: 100 - protein, 445 aa, Artificial Sequence; identical to SEQ ID NO: 85
  XENP13243 Anti-CD38

SEQ ID NO: 101 - protein, 485 aa, Artificial Sequence; identical to SEQ ID NO: 83
  XENP13243 Anti-CD38

SEQ ID NO: 102 - protein, 214 aa, Artificial Sequence; identical to SEQ ID NO: 87
  XENP13243 Anti-CD38

SEQ ID NO: 103 - protein, 445 aa, Artificial Sequence; identical to SEQ ID NO: 82
  XENP18967 Anti-CD38

SEQ ID NO: 104 - protein, 485 aa, Artificial Sequence
  XENP18967 Anti-CD38
EVQLVESGGGLVQPGGSLRLSCAASGFTFSTYAMNWVRQAPGKGLEWVGRIRSKANNYATYYADSVKGRFTISRDDSKNTLYLQMNSLRAEDTAVYYCVRHGNFGDSYVSWFAYWGQGTLVTVSSGKPGSGKPGSGKPGSGKPGSQAVVTQEPSLTVSPGGTVTLTCGSSTGAVTTSNYANWVQQKPGKSPRGLIGGTNKRAPGVPARFSGSLLGGKAALTISGAQPEDEADYYCALWYSNHWVFGGGTKLTVLEPKSSDKTHTCPPCPAPPVAGPSVFLFPPKPKDTLMISRTPEVTCVVVDVKHEDPEVKFNWYVDGVEVHNAKTKPREEQYNSTYRVVSVLTVLHQDWLNGKEYKCKVSNKALPAPIEKTISKAKGQPREPQVYTLPPSREQMTKNQVKLTCLVKGFYPSDIAVEWESNGQPENNYKTTPPVLDSDGSFFLYSKLTVDKSRWQQGNVFSCSVMHEALHNHYTQKSLSLSPGK

SEQ ID NO: 105 - protein, 214 aa, Artificial Sequence; identical to SEQ ID NO: 84
  XENP18967 Anti-CD38

SEQ ID NO: 106 - protein, 445 aa, Artificial Sequence; identical to SEQ ID NO: 85
  XENP18971 Anti-CD38

SEQ ID NO: 107 - protein, 485 aa, Artificial Sequence; identical to SEQ ID NO: 104
  XENP18971 Anti-CD38

SEQ ID NO: 108 - protein, 214 aa, Artificial Sequence; identical to SEQ ID NO: 87
  XENP18971 Anti-CD38

SEQ ID NO: 109 - protein, 445 aa, Artificial Sequence; identical to SEQ ID NO: 85
  XENP18969 Anti-CD38

SEQ ID NO: 110 - protein, 485 aa, Artificial Sequence; identical to SEQ ID NO: 92
  XENP18969 Anti-CD38

SEQ ID NO: 111 - protein, 214 aa, Artificial Sequence; identical to SEQ ID NO: 84
  XENP18969 Anti-CD38

SEQ ID NO: 112 - protein, 445 aa, Artificial Sequence; identical to SEQ ID NO: 85
  XENP18970 Anti-CD38

SEQ ID NO: 113 - protein, 485 aa, Artificial Sequence; identical to SEQ ID NO: 89
  XENP18970 Anti-CD38

SEQ ID NO: 114 - protein, 214 aa, Artificial Sequence; identical to SEQ ID NO: 84
  XENP18970 Anti-CD38

SEQ ID NO: 115 - protein, 445 aa, Artificial Sequence; identical to SEQ ID NO: 85
  XENP18972 Anti-CD38

SEQ ID NO: 116 - protein, 485 aa, Artificial Sequence; identical to SEQ ID NO: 92
  XENP18972 Anti-CD38

SEQ ID NO: 117 - protein, 214 aa, Artificial Sequence; identical to SEQ ID NO: 87
  XENP18972 Anti-CD38

SEQ ID NO: 118 - protein, 445 aa, Artificial Sequence; identical to SEQ ID NO: 85
  XENP18973 Anti-CD38

SEQ ID NO: 119 - protein, 485 aa, Artificial Sequence; identical to SEQ ID NO: 89
  XENP18973 Anti-CD38

SEQ ID NO: 120 - protein, 214 aa, Artificial Sequence; identical to SEQ ID NO: 87
  XENP18973 Anti-CD38

SEQ ID NO: 121 - protein, 445 aa, Artificial Sequence; identical to SEQ ID NO: 85
  XENP15055 Anti-CD38

SEQ ID NO: 122 - protein, 485 aa, Artificial Sequence; identical to SEQ ID NO: 92
  XENP15055 Anti-CD38

SEQ ID NO: 123 - protein, 214 aa, Artificial Sequence; identical to SEQ ID NO: 87
  XENP15055 Anti-CD38

SEQ ID NO: 124 - protein, 445 aa, Artificial Sequence; identical to SEQ ID NO: 85
  XENP13544 Anti-CD38

SEQ ID NO: 125 - protein, 485 aa, Artificial Sequence
  XENP13544 Anti-CD38
EVQLVESGGGLVQPGGSLRLSCAASGFTFSTYAMNWVRQAPGKCLEWVGRIRSKYNNYATYYADSVKGRFTISRDDSKNTLYLQMNSLRAEDTAVYYCVRHGNFGDSYVSWFAYWGQGTLVTVSSGKPGSGKPGSGKPGSGKPGSQAVVTQEPSLTVSPGGTVTLTCGSSTGAVTTSNYANWVQQKPGKSPRGLIGGTNKRAPGVPARFSGSLLGGKAALTISGAQPEDEADYYCALWYSNHWVFGCGTKLTVLEPKSSDKTHTCPPCPAPPVAGPSVFLFPPKPKDTLMISRTPEVTCVVVDVKHEDPEVKFNWYVDGVEVHNAKTKPREEQYNSTYRVVSVLTVLHQDWLNGKEYKCKVSNKALPAPIEKTISKAKGQPREPQVYTLPPSREQMTKNQVKLTCLVKGFYPSDIAVEWESNGQPENNYKTTPPVLDSDGSFFLYSKLTVDKSRWQQGNVFSCSVMHEALHNHYTQKSLSLSPGK

SEQ ID NO: 126 - protein, 214 aa, Artificial Sequence; identical to SEQ ID NO: 87
  XENP13544 Anti-CD38

SEQ ID NO: 127 - protein, 445 aa, Artificial Sequence; identical to SEQ ID NO: 82
  XENP13694 Anti-CD38

SEQ ID NO: 128 - protein, 485 aa, Artificial Sequence; identical to SEQ ID NO: 125
  XENP13694 Anti-CD38

SEQ ID NO: 129 - protein, 214 aa, Artificial Sequence; identical to SEQ ID NO: 84
  XENP13694 Anti-CD38

SEQ ID NO: 130 - protein, 207 aa, Artificial Sequence
  CD3E HUMAN Tcell
MQSGTHWRVLGLCLLSVGVWGQDGNEEMGGITQTPYKVSISGTTVILTCPQYPGSEILWQHNDKNIGGDEDDKNIGSDEDHLSLKEFSELEQSGYYVCYPRGSKPEDANFYLYLRARVCENCMEMDVMSVATIVIVDICITGGLLLLVYYWSKNRKAKAKPVTRGAGAGGRQRGQNKERPPPVPNPDYEPIRKGQRDLYSGLNQRRI

SEQ ID NO: 131 - protein, 300 aa, Artificial Sequence
  Human CD38 sequence
MANCEFSPVSGDKPCCRLSRRAQLCLGVSILVLILVVVLAVVVPRWRQQWSGPGTTKRFPETVLARCVKYTEIHPEMRHVDCQSVWDAFKGAFISKHPCNITEEDYQPLMKLGTQTVPCNKILLWSRIKDLAHQFTQVQRDMFTLEDTLLGYLADDLTWCGEFNTSKINYQSCPDWRKDCSNNPVSVFWKTVSRRFAEAACDVVHVMLNGSRSKIFDKNSTFGSVEVHNLQPEKVQTLEAWVIHGGREDSRDLCQDPTIKELESIISKRNIQFSCKNIYRPDKFLQCVKNPEDSSCTSEI

SEQ ID NO: 132 - protein, 258 aa, Artificial Sequence
  ECD domain
VPRWRQQWSGPGTTKRFPETVLARCVKYTEIHPEMRHVDCQSVWDAFKGAFISKHPCNITEEDYQPLMKLGTQTVPCNKILLWSRIKDLAHQFTQVQRDMFTLEDTLLGYLADDLTWCGEFNTSKINYQSCPDWRKDCSNNPVSVFWKTVSRRFAEAACDVVHVMLNGSRSKIFDKNSTFGSVEVHNLQPEKVQTLEAWVIHGGREDSRDLCQDPTIKELESIISKRNIQFSCKNIYRPDKFLQCVKNPEDSSCTSEI

SEQ ID NO: 133 - protein, 15 aa, Artificial Sequence
  Positive charged scFv linkers
GGGGSGGGGSGGGGS

SEQ ID NO: 134 - protein, 18 aa, Artificial Sequence
  Positive charged scFv linkers
GSTSGSGKPGSGEGSTKG

SEQ ID NO: 135 - protein, 14 aa, Artificial Sequence
  Positive charged scFv linkers
IRPRAIGGSKPRVA

SEQ ID NO: 136 - protein, 15 aa, Artificial Sequence
  Positive charged scFv linkers
GKGGSGKGGSGKGGS

SEQ ID NO: 137 - protein, 15 aa, Artificial Sequence
  Positive charged scFv linkers
GGKGSGGKGSGGKGS

SEQ ID NO: 138 - protein, 15 aa, Artificial Sequence
  Positive charged scFv linkers
GGGKSGGGKSGGGKS

SEQ ID NO: 139 - protein, 15 aa, Artificial Sequence
  Positive charged scFv linkers
GKGKSGKGKSGKGKS

SEQ ID NO: 140 - protein, 15 aa, Artificial Sequence
  Positive charged scFv linkers
GGGKSGGKGSGKGGS

SEQ ID NO: 141 - protein, 15 aa, Artificial Sequence
  Positive charged scFv linkers
GKPGSGKPGSGKPGS

SEQ ID NO: 142 - protein, 20 aa, Artificial Sequence
  Positive charged scFv linkers
GKPGSGKPGSGKPGSGKPGS

SEQ ID NO: 143 - protein, 20 aa, Artificial Sequence
  Positive charged scFv linkers
GKGKSGKGKSGKGKSGKGKS

SEQ ID NO: 144 - protein, 20 aa, Artificial Sequence
  Negative charged scFv linkers
GGGGSGGGGSGGGGSGGGGS

SEQ ID NO: 145 - protein, 14 aa, Artificial Sequence
  Negative charged scFv linkers
STAGDTHLGGEDFD

SEQ ID NO: 146 - protein, 15 aa, Artificial Sequence
  Negative charged scFv linkers
GEGGSGEGGSGEGGS

SEQ ID NO: 147 - protein, 15 aa, Artificial Sequence
  Negative charged scFv linkers
GGEGSGGEGSGGEGS

SEQ ID NO: 148 - protein, 15 aa, Artificial Sequence
  Negative charged scFv linkers
GGGESGGGESGGGES

SEQ ID NO: 149 - protein, 15 aa, Artificial Sequence
  Negative charged scFv linkers
GEGESGEGESGEGES

SEQ ID NO: 150 - protein, 15 aa, Artificial Sequence
  Negative charged scFv linkers
GGGESGGEGSGEGGS

SEQ ID NO: 151 - protein, 20 aa, Artificial Sequence
  Negative charged scFv linkers
GEGESGEGESGEGESGEGES

SEQ ID NO: 152 - protein, 15 aa, Artificial Sequence
  scFv Linkers
GGGGSGGGGSGGGGS

SEQ ID NO: 153 - protein, 20 aa, Artificial Sequence
  scFv Linkers
GGGGSGGGGSGGGGSGGGGS

SEQ ID NO: 154 - protein, 18 aa, Artificial Sequence
  scFv Linkers
GSTSGSGKPGSGEGSTKG

SEQ ID NO: 155 - protein, 19 aa, Artificial Sequence
  scFv Linkers
PRGASKSGSASQTGSAPGS

SEQ ID NO: 156 - protein, 19 aa, Artificial Sequence
  scFv Linkers
GTAAAGAGAAGGAAAGAAG

SEQ ID NO: 157 - protein, 19 aa, Artificial Sequence
  scFv Linkers
GTSGSSGSGSGGSGSGGGG

SEQ ID NO: 158 - protein, 20 aa, Artificial Sequence
  scFv Linkers
GKPGSGKPGSGKPGSGKPGS

SEQ ID NO: 159 - protein, 445 aa, Artificial Sequence; identical to SEQ ID NO: 85
  XENP14419 Anti-CD38

SEQ ID NO: 160 - protein, 714 aa, Artificial Sequence
  XENP14419 Anti-CD38
EVQLVESGGGLVQPGGSLRLSCAASGFDFSRSWMNWVRQAPGKGLEWVSEINPDSSTINYATSVKGRFTISRDNSKNTLYLQMNSLRAEDTAVYYCARYGNWFPYWGQGTLVTVSSASTKGPSVFPLAPSSKSTSGGTAALGCLVKDYFPEPVTVSWNSGALTSGVHTFPAVLQSSGLYSLSSVVTVPSSSLGTQTYICNVNHKPSNTKVDKKVEPKSCDKTHTCPPCPAPPVAGPSVFLFPPKPKDTLMISRTPEVTCVVVDVKHEDPEVKFNWYVDGVEVHNAKTKPREEQYNSTYRVVSVLTVLHQDWLNGKEYKCKVSNKALPAPIEKTISKAKGQPREPQVYTLPPSREQMTKNQVKLTCLVKGFYPSDIAVEWESNGQPENNYKTTPPVLDSDGSFFLYSKLTVDKSRWQQGNVFSCSVMHEALHNHYTQKSLSLSPGKGGGGSGGGGSGGGGSEVQLVESGGGLVQPGGSLRLSCAASGFTFSTYAMNWVRQAPGKGLEWVGRIRSKYNNYATYYADSVKGRFTISRDDSKNTLYLQMNSLRAEDTAVYYCVRHGNFGDSYVSWFAYWGQGTLVTVSSGKPGSGKPGSGKPGSGKPGSQAVVTQEPSLTVSPGGTVTLTCGSSTGAVTTSNYANWVQQKPGKSPRGLIGGTNKRAPGVPARFSGSLLGGKAALTISGAQPEDEADYYCALWYSNHWVFGGGTKLTVL

SEQ ID NO: 161 - protein, 214 aa, Artificial Sequence; identical to SEQ ID NO: 87
  XENP14419 Anti-CD38

SEQ ID NO: 162 - protein, 585 aa, Artificial Sequence
  XENP14420 Anti-CD38
EVQLVESGGGLVQPGGSLRLSCAASGFDFSRSWMNWVRQAPGKGLEWVSEINPDSSTINYATSVKGRFTISRDNSKNTLYLQMNSLRAEDTAVYYCARYGNWFPYWGQGTLVTVSSASTKGPSVFPLAPSSKSTSGGTAALGCLVKDYFPEPVTVSWNSGALTSGVHTFPAVLQSSGLYSLSSVVTVPSSSLGTQTYICNVNHKPSDTKVDKKVEPKSCDKTHTCPPCPAPPVAGPSVFLFPPKPKDTLMISRTPEVTCVVVDVKHEDPEVKFNWYVDGVEVHNAKTKPREEEYNSTYRVVSVLTVLHQDWLNGKEYKCKVSNKALPAPIEKTISKAKGQPREPQVYTLPPSREEMTKNQVSLTCDVSGFYPSDIAVEWESDGQPENNYKTTPPVLDSDGSFFLYSKLTVDKSRWEQGDVFSCSVMHEALHNHYTQKSLSLSPGKGGGGSGGGGSGGGGSEVQLVESGGGLVQPGGSLRLSCAASGFTFSTYAMNWVRQAPGKGLEWVGRIRSKYNNYATYYADSVKGRFTISRDDSKNTLYLQMNSLRAEDTAVYYCVRHGNFGDSYVSWFAYWGQGTLVTVSS

SEQ ID NO: 163 - protein, 569 aa, Artificial Sequence
  XENP14420 Anti-CD38
EVQLVESGGGLVQPGGSLRLSCAASGFDFSRSWMNWVRQAPGKGLEWVSEINPDSSTINYATSVKGRFTISRDNSKNTLYLQMNSLRAEDTAVYYCARYGNWFPYWGQGTLVTVSSASTKGPSVFPLAPSSKSTSGGTAALGCLVKDYFPEPVTVSWNSGALTSGVHTFPAVLQSSGLYSLSSVVTVPSSSLGTQTYICNVNHKPSNTKVDKKVEPKSCDKTHTCPPCPAPPVAGPSVFLFPPKPKDTLMISRTPEVTCVVVDVKHEDPEVKFNWYVDGVEVHNAKTKPREEQYNSTYRVVSVLTVLHQDWLNGKEYKCKVSNKALPAPIEKTISKAKGQPREPQVYTLPPSREQMTKNQVKLTCLVKGFYPSDIAVEWESNGQPENNYKTTPPVLDSDGSFFLYSKLTVDKSRWQQGNVFSCSVMHEALHNHYTQKSLSLSPGKGGGGSGGGGSGGGGSQAVVTQEPSLTVSPGGTVTLTCGSSTGAVTTSNYANWVQQKPGKSPRGLIGGTNKRAPGVPARFSGSLLGGKAALTISGAQPEDEADYYCALWYSNHWVFGGGTKLTVL

SEQ ID NO: 164 - protein, 214 aa, Artificial Sequence; identical to SEQ ID NO: 87
  XENP14420 Anti-CD38

SEQ ID NO: 165 - protein, 445 aa, Artificial Sequence; identical to SEQ ID NO: 85
  XENP14421 Anti-CD38

SEQ ID NO: 166 - protein, 718 aa, Artificial Sequence
  XENP14421 Anti-CD38
EVQLVESGGGLVQPGGSLRLSCAASGFDFSRSWMNWVRQAPGKGLEWVSEINPDSSTINYATSVKGRFTISRDNSKNTLYLQMNSLRAEDTAVYYCARYGNWFPYWGQGTLVTVSSASTKGPSVFPLAPSSKSTSGGTAALGCLVKDYFPEPVTVSWNSGALTSGVHTFPAVLQSSGLYSLSSVVTVPSSSLGTQTYICNVNHKPSNTKVDKKVEPKSCGGGGSGGGGSEVQLVESGGGLVQPGGSLRLSCAASGFTFSTYAMNWVRQAPGKGLEWVGRIRSKYNNYATYYADSVKGRFTISRDDSKNTLYLQMNSLRAEDTAVYYCVRHGNFGDSYVSWFAYWGQGTLVTVSSGKPGSGKPGSGKPGSGKPGSQAVVTQEPSLTVSPGGTVTLTCGSSTGAVTTSNYANWVQQKPGKSPRGLIGGTNKRAPGVPARFSGSLLGGKAALTISGAQPEDEADYYCALWYSNHWVFGGGTKLTVLGGGGSGGGGSKTHTCPPCPAPPVAGPSVFLFPPKPKDTLMISRTPEVTCVVVDVKHEDPEVKFNWYVDGVEVHNAKTKPREEQYNSTYRVVSVLTVLHQDWLNGKEYKCKVSNKALPAPIEKTISKAKGQPREPQVYTLPPSREQMTKNQVKLTCLVKGFYPSDIAVEWESNGQPENNYKTTPPVLDSDGSFFLYSKLTVDKSRWQQGNVFSCSVMHEALHNHYTQKSLSLSPGK

SEQ ID NO: 167 - protein, 214 aa, Artificial Sequence; identical to SEQ ID NO: 87
  XENP14421 Anti-CD38

SEQ ID NO: 168 - protein, 231 aa, Artificial Sequence
  XENP14422 Anti-CD38
EPKSSDKTHTCPPCPAPPVAGPSVFLFPPKPKDTLMISRTPEVTCVVVDVKHEDPEVKFNWYVDGVEVHNAKTKPREEEYNSTYRVVSVLTVLHQDWLNGKEYKCKVSNKALPAPIEKTISKAKGQPREPQVYTLPPSREEMTKNQVSLTCDVSGFYPSDIAVEWESDGQPENNYKTTPPVLDSDGSFFLYSKLTVDKSRWEQGDVFSCSVMHEALHNHYTQKSLSLSPGK

SEQ ID NO: 169 - protein, 718 aa, Artificial Sequence; identical to SEQ ID NO: 166
  XENP14422 Anti-CD38

SEQ ID NO: 170 - protein, 214 aa, Artificial Sequence; identical to SEQ ID NO: 87
  XENP14422 Anti-CD38

SEQ ID NO: 171 - protein, 589 aa, Artificial Sequence
  XENP14423 Anti-CD38
EVQLVESGGGLVQPGGSLRLSCAASGFDFSRSWMNWVRQAPGKGLEWVSEINPDSSTINYATSVKGRFTISRDNSKNTLYLQMNSLRAEDTAVYYCARYGNWFPYWGQGTLVTVSSASTKGPSVFPLAPSSKSTSGGTAALGCLVKDYFPEPVTVSWNSGALTSGVHTFPAVLQSSGLYSLSSVVTVPSSSLGTQTYICNVNHKPSDTKVDKKVEPKSCGGGGSGGGGSEVQLVESGGGLVQPGGSLRLSCAASGFTFSTYAMNWVRQAPGKGLEWVGRIRSKYNNYATYYADSVKGRFTISRDDSKNTLYLQMNSLRAEDTAVYYCVRHGNFGDSYVSWFAYWGQGTLVTVSSGGGGSGGGGSKTHTCPPCPAPPVAGPSVFLFPPKPKDTLMISRTPEVTCVVVDVKHEDPEVKFNWYVDGVEVHNAKTKPREEEYNSTYRVVSVLTVLHQDWLNGKEYKCKVSNKALPAPIEKTISKAKGQPREPQVYTLPPSREEMTKNQVSLTCDVSGFYPSDIAVEWESDGQPENNYKTTPPVLDSDGSFFLYSKLTVDKSRWEQGDVFSCSVMHEALHNHYTQKSLSLSPGK

SEQ ID NO: 172 - protein, 573 aa, Artificial Sequence
  XENP14423 Anti-CD38
EVQLVESGGGLVQPGGSLRLSCAASGFDFSRSWMNWVRQAPGKGLEWVSEINPDSSTINYATSVKGRFTISRDNSKNTLYLQMNSLRAEDTAVYYCARYGNWFPYWGQGTLVTVSSASTKGPSVFPLAPSSKSTSGGTAALGCLVKDYFPEPVTVSWNSGALTSGVHTFPAVLQSSGLYSLSSVVTVPSSSLGTQTYICNVNHKPSNTKVDKKVEPKSCGGGGSGGGGSQAVVTQEPSLTVSPGGTVTLTCGSSTGAVTTSNYANWVQQKPGKSPRGLIGGTNKRAPGVPARFSGSLLGGKAALTISGAQPEDEADYYCALWYSNHWVFGGGTKLTVLGGGGSGGGGSKTHTCPPCPAPPVAGPSVFLFPPKPKDTLMISRTPEVTCVVVDVKHEDPEVKFNWYVDGVEVHNAKTKPREEQYNSTYRVVSVLTVLHQDWLNGKEYKCKVSNKALPAPIEKTISKAKGQPREPQVYTLPPSREQMTKNQVKLTCLVKGFYPSDIAVEWESNGQPENNYKTTPPVLDSDGSFFLYSKLTVDKSRWQQGNVFSCSVMHEALHNHYTQKSLSLSPGK

SEQ ID NO: 173 - protein, 214 aa, Artificial Sequence; identical to SEQ ID NO: 87
  XENP14423 Anti-CD38

SEQ ID NO: 174 - protein, 231 aa, Artificial Sequence; identical to SEQ ID NO: 168
  XENP15427 Anti-CD38

SEQ ID NO: 175 - protein, 714 aa, Artificial Sequence
  XENP15427 Anti-CD38
EVQLVESGGGLVQPGGSLRLSCAASGFDFSRSWMNWVRQAPGKGLEWVSEINPDSSTINYATSVKGRFTISRDNSKNTLYLQMNSLRAEDTAVYYCARYGNWFPYWGQGTLVTVSSASTKGPSVFPLAPSSKSTSGGTAALGCLVKDYFPEPVTVSWNSGALTSGVHTFPAVLQSSGLYSLSSVVTVPSSSLGTQTYICNVNHKPSNTKVDKKVEPKSCDKTHTCPPCPAPPVAGPSVFLFPPKPKDTLMISRTPEVTCVVVDVKHEDPEVKFNWYVDGVEVHNAKTKPREEQYNSTYRVVSVLTVLHQDWLNGKEYKCKVSNKALPAPIEKTISKAKGQPREPQVYTLPPSREQMTKNQVKLTCLVKGFYPSDIAVEWESNGQPENNYKTTPPVLDSDGSFFLYSKLTVDKSRWQQGNVFSCSVMHEALHNHYTQKSLSLSPGKGGGGSGGGGSGGGGSEVQLVESGGGLVQPGGSLRLSCAASGFTFSTYAMSWVRQAPGKGLEWVGRIRSKYNNYATYYADSVKGRFTISRDDSKNTLYLQMNSLRAEDTAVYYCVRHGNFGDSYVSWFAYWGQGTLVTVSSGKPGSGKPGSGKPGSGKPGSQAVVTQEPSLTVSPGGTVTLTCGSSTGAVTTSNYANWVQQKPGKSPRGLIGGTNKRAPGVPARFSGSLLGGKAALTISGAQPEDEADYYCALWYSNHWVFGGGTKLTVL

SEQ ID NO: 176 - protein, 214 aa, Artificial Sequence; identical to SEQ ID NO: 87
  XENP15427 Anti-CD38

SEQ ID NO: 177 - protein, 231 aa, Artificial Sequence; identical to SEQ ID NO: 168
  XENP15428 Anti-CD38

SEQ ID NO: 178 - protein, 714 aa, Artificial Sequence
  XENP15428 Anti-CD38
EVQLVESGGGLVQPGGSLRLSCAASGFDFSRSWMNWVRQAPGKGLEWVSEINPDSSTINYATSVKGRFTISRDNSKNTLYLQMNSLRAEDTAVYYCARYGNWFPYWGQGTLVTVSSASTKGPSVFPLAPSSKSTSGGTAALGCLVKDYFPEPVTVSWNSGALTSGVHTFPAVLQSSGLYSLSSVVTVPSSSLGTQTYICNVNHKPSNTKVDKKVEPKSCDKTHTCPPCPAPPVAGPSVFLFPPKPKDTLMISRTPEVTCVVVDVKHEDPEVKFNWYVDGVEVHNAKTKPREEQYNSTYRVVSVLTVLHQDWLNGKEYKCKVSNKALPAPIEKTISKAKGQPREPQVYTLPPSREQMTKNQVKLTCLVKGFYPSDIAVEWESNGQPENNYKTTPPVLDSDGSFFLYSKLTVDKSRWQQGNVFSCSVMHEALHNHYTQKSLSLSPGKGGGGSGGGGSGGGGSEVQLVESGGGLVQPGGSLRLSCAASGFTFSTYAMNWVRQAPGKGLEWVGRIRSKYNNYATYYADSVKGRFTISRDDSKNTLYLQMNSLRAEDTAVYYCVRHGNFGDSYVSWFDYWGQGTLVTVSSGKPGSGKPGSGKPGSGKPGSQAVVTQEPSLTVSPGGTVTLTCGSSTGAVTTSNYANWVQQKPGKSPRGLIGGTNKRAPGVPARFSGSLLGGKAALTISGAQPEDEADYYCALWYSNHWVFGGGTKLTVL

SEQ ID NO: 179 - protein, 214 aa, Artificial Sequence; identical to SEQ ID NO: 87
  XENP15428 Anti-CD38

SEQ ID NO: 180 - protein, 231 aa, Artificial Sequence; identical to SEQ ID NO: 168
  XENP15429 Anti-CD38

SEQ ID NO: 181 - protein, 714 aa, Artificial Sequence; identical to SEQ ID NO: 160
  XENP15429 Anti-CD38

SEQ ID NO: 182 - protein, 214 aa, Artificial Sequence; identical to SEQ ID NO: 87
  XENP15429 Anti-CD38

SEQ ID NO: 183 - protein, 231 aa, Artificial Sequence; identical to SEQ ID NO: 168
  XENP15430 Anti-CD38

SEQ ID NO: 184 - protein, 718 aa, Artificial Sequence
  XENP15430 Anti-CD38
EVQLVESGGGLVQPGGSLRLSCAASGFDFSRSWMNWVRQAPGKGLEWVSEINPDSSTINYATSVKGRFTISRDNSKNTLYLQMNSLRAEDTAVYYCARYGNWFPYWGQGTLVTVSSASTKGPSVFPLAPSSKSTSGGTAALGCLVKDYFPEPVTVSWNSGALTSGVHTFPAVLQSSGLYSLSSVVTVPSSSLGTQTYICNVNHKPSNTKVDKKVEPKSCGGGGSGGGGSEVQLVESGGGLVQPGGSLRLSCAASGFTFSTYAMSWVRQAPGKGLEWVGRIRSKYNNYATYYADSVKGRFTISRDDSKNTLYLQMNSLRAEDTAVYYCVRHGNFGDSYVSWFAYWGQGTLVTVSSGKPGSGKPGSGKPGSGKPGSQAVVTQEPSLTVSPGGTVTLTCGSSTGAVTTSNYANWVQQKPGKSPRGLIGGTNKRAPGVPARFSGSLLGGKAALTISGAQPEDEADYYCALWYSNHWVFGGGTKLTVLGGGGSGGGGSKTHTCPPCPAPPVAGPSVFLFPPKPKDTLMISRTPEVTCVVVDVKHEDPEVKFNWYVDGVEVHNAKTKPREEQYNSTYRVVSVLTVLHQDWLNGKEYKCKVSNKALPAPIEKTISKAKGQPREPQVYTLPPSREQMTKNQVKLTCLVKGFYPSDIAVEWESNGQPENNYKTTPPVLDSDGSFFLYSKLTVDKSRWQQGNVFSCSVMHEALHNHYTQKSLSLSPGK

SEQ ID NO: 185 - protein, 214 aa, Artificial Sequence; identical to SEQ ID NO: 87
  XENP15430 Anti-CD38

SEQ ID NO: 186 - protein, 231 aa, Artificial Sequence; identical to SEQ ID NO: 168
  XENP15431 Anti-CD38

SEQ ID NO: 187 - protein, 718 aa, Artificial Sequence; identical to SEQ ID NO: 184
  XENP15431 Anti-CD38

SEQ ID NO: 188 - protein, 214 aa, Artificial Sequence; identical to SEQ ID NO: 87
  XENP15431 Anti-CD38

SEQ ID NO: 189 - protein, 231 aa, Artificial Sequence; identical to SEQ ID NO: 168
  XENP15432 Anti-CD38

SEQ ID NO: 190 - protein, 718 aa, Artificial Sequence; identical to SEQ ID NO: 166
  XENP15432 Anti-CD38

SEQ ID NO: 191 - protein, 214 aa, Artificial Sequence; identical to SEQ ID NO: 87
  XENP15432 Anti-CD38

SEQ ID NO: 192 - protein, 445 aa, Artificial Sequence; identical to SEQ ID NO: 85
  XENP15433 Anti-CD38

SEQ ID NO: 193 - protein, 714 aa, Artificial Sequence; identical to SEQ ID NO: 175
  XENP15433 Anti-CD38

SEQ ID NO: 194 - protein, 214 aa, Artificial Sequence; identical to SEQ ID NO: 87
  XENP15433 Anti-CD38

SEQ ID NO: 195 - protein, 445 aa, Artificial Sequence; identical to SEQ ID NO: 85
  XENP15434 Anti-CD38

SEQ ID NO: 196 - protein, 714 aa, Artificial Sequence; identical to SEQ ID NO: 178
  XENP15434 Anti-CD38

SEQ ID NO: 197 - protein, 214 aa, Artificial Sequence; identical to SEQ ID NO: 87
  XENP15434 Anti-CD38

SEQ ID NO: 198 - protein, 445 aa, Artificial Sequence; identical to SEQ ID NO: 85
  XENP15435 Anti-CD38

SEQ ID NO: 199 - protein, 714 aa, Artificial Sequence; identical to SEQ ID NO: 160
  XENP15435 Anti-CD38

SEQ ID NO: 200 - protein, 214 aa, Artificial Sequence; identical to SEQ ID NO: 87
  XENP15435 Anti-CD38

SEQ ID NO: 201 - protein, 445 aa, Artificial Sequence; identical to SEQ ID NO: 85
  XENP15436 Anti-CD38

SEQ ID NO: 202 - protein, 718 aa, Artificial Sequence; identical to SEQ ID NO: 184
  XENP15436 Anti-CD38

SEQ ID NO: 203 - protein, 214 aa, Artificial Sequence; identical to SEQ ID NO: 87
  XENP15436 Anti-CD38

SEQ ID NO: 204 - protein, 445 aa, Artificial Sequence; identical to SEQ ID NO: 85
  XENP15437 Anti-CD38

SEQ ID NO: 205 - protein, 718 aa, Artificial Sequence; identical to SEQ ID NO: 184
  XENP15437 Anti-CD38

SEQ ID NO: 206 - protein, 214 aa, Artificial Sequence; identical to SEQ ID NO: 87
  XENP15437 Anti-CD38

SEQ ID NO: 207 - protein, 445 aa, Artificial Sequence; identical to SEQ ID NO: 85
  XENP15438 Anti-CD38

SEQ ID NO: 208 - protein, 718 aa, Artificial Sequence; identical to SEQ ID NO: 166
  XENP15438 Anti-CD38

SEQ ID NO: 209 - protein, 214 aa, Artificial Sequence; identical to SEQ ID NO: 87
  XENP15438 Anti-CD38

SEQ ID NO: 210 - protein, 262 aa, Artificial Sequence
  anti-CD3 sequences
EVQLVESGGGLVQPGGSLRLSCAASGFTFSTYAMNWVRQAPGKGLEWVGRIRSKYNNYATYYADSVKGRFTISRDDSKNTLYLQMNSLRAEDTAVYYCVRHGNFGDSYVSWFAYWGQGTLVTVSSGKPGSGKPGSGKPGSGKPGSQAVVTQEPSLTVSPGGTVTLTCGSSTGAVTTSNYANWVQQKPGKSPRGLIGGTNKRAPGVPARFSGSLLGGKAALTISGAQPEDEADYYCALWYSNHWVFGGGTKLTVLGSHHHHHH

SEQ ID NO: 211 - protein, 254 aa, Artificial Sequence; identical to SEQ ID NO: 9
  anti-CD3 sequences

SEQ ID NO: 212 - protein, 125 aa, Artificial Sequence; identical to SEQ ID NO: 1
  anti-CD3 sequences

SEQ ID NO: 213 - protein, 109 aa, Artificial Sequence; identical to SEQ ID NO: 5
  anti-CD3 sequences

SEQ ID NO: 214 - protein, 262 aa, Artificial Sequence; identical to SEQ ID NO: 210
  anti-CD3 sequences

SEQ ID NO: 215 - protein, 254 aa, Artificial Sequence; identical to SEQ ID NO: 9
  anti-CD3 sequences

SEQ ID NO: 216 - protein, 125 aa, Artificial Sequence; identical to SEQ ID NO: 1
  anti-CD3 sequences

SEQ ID NO: 217 - protein, 109 aa, Artificial Sequence; identical to SEQ ID NO: 5
  anti-CD3 sequences

SEQ ID NO: 218 - protein, 262 aa, Artificial Sequence
  anti-CD3 sequences
EVQLVESGGGLVQPGGSLRLSCAASGFTFSTYAMNWVRQAPGKGLEWVGRIRSKYNNYATYYADSVKGRFTISRDDSKNTLYLQMNSLRAEDTAVYYCVRHGNFGDSYVSWFDYWGQGTLVTVSSGKPGSGKPGSGKPGSGKPGSQAVVTQEPSLTVSPGGTVTLTCGSSTGAVTTSNYANWVQQKPGKSPRGLIGGTNKRAPGVPARFSGSLLGGKAALTISGAQPEDEADYYCALWYSNHWVFGGGTKLTVLGSHHHHHH

SEQ ID NO: 219 - protein, 254 aa, Artificial Sequence; identical to SEQ ID NO: 45
  anti-CD3 sequences

SEQ ID NO: 220 - protein, 125 aa, Artificial Sequence; identical to SEQ ID NO: 37
  anti-CD3 sequences

SEQ ID NO: 221 - protein, 109 aa, Artificial Sequence; identical to SEQ ID NO: 5
  anti-CD3 sequences

SEQ ID NO: 222 - protein, 262 aa, Artificial Sequence
  anti-CD3 sequences
EVQLVESGGGLVQPGGSLRLSCAASGFTFSTYAMSWVRQAPGKGLEWVGRIRSKYNNYATYYADSVKGRFTISRDDSKNTLYLQMNSLRAEDTAVYYCVRHGNFGDSYVSWFAYWGQGTLVTVSSGKPGSGKPGSGKPGSGKPGSQAVVTQEPSLTVSPGGTVTLTCGSSTGAVTTSNYANWVQQKPGKSPRGLIGGTNKRAPGVPARFSGSLLGGKAALTISGAQPEDEADYYCALWYSNHWVFGGGTKLTVLGSHHHHHH

SEQ ID NO: 223 - protein, 254 aa, Artificial Sequence; identical to SEQ ID NO: 54
  anti-CD3 sequences

SEQ ID NO: 224 - protein, 125 aa, Artificial Sequence; identical to SEQ ID NO: 46
  anti-CD3 sequences

SEQ ID NO: 225 - protein, 109 aa, Artificial Sequence; identical to SEQ ID NO: 5
  anti-CD3 sequences

SEQ ID NO: 226 - protein, 262 aa, Artificial Sequence
  anti-CD3 sequences
EVQLVESGGGLVQPGGSLRLSCAASGFTFSTYAMNWVRQAPGKGLEWVGRIRSKANNYATYYADSVKGRFTISRDDSKNTLYLQMNSLRAEDTAVYYCVRHGNFGDSYVSWFAYWGQGTLVTVSSGKPGSGKPGSGKPGSGKPGSQAVVTQEPSLTVSPGGTVTLTCGSSTGAVTTSNYANWVQQKPGKSPRGLIGGTNKRAPGVPARFSGSLLGGKAALTISGAQPEDEADYYCALWYSNHWVFGGGTKLTVLGSHHHHHH

SEQ ID NO: 227 - protein, 254 aa, Artificial Sequence; identical to SEQ ID NO: 18
  anti-CD3 sequences

SEQ ID NO: 228 - protein, 125 aa, Artificial Sequence; identical to SEQ ID NO: 10
  anti-CD3 sequences

SEQ ID NO: 229 - protein, 109 aa, Artificial Sequence; identical to SEQ ID NO: 5
  anti-CD3 sequences

SEQ ID NO: 230 - protein, 262 aa, Artificial Sequence
  anti-CD3 sequences
EVQLVESGGGLVQPGGSLRLSCAASGFTFSTYAMNWVRQAPGKGLEWVGRIRSKYNNYATYYADSVKGRFTISRDDSKNTLYLQMNSLRAEDTAVYYCVRHGNFGPSYVSWFAYWGQGTLVTVSSGKPGSGKPGSGKPGSGKPGSQAVVTQEPSLTVSPGGTVTLTCGSSTGAVTTSNYANWVQQKPGKSPRGLIGGTNKRAPGVPARFSGSLLGGKAALTISGAQPEDEADYYCALWYSNHWVFGGGTKLTVLGSHHHHHH

SEQ ID NO: 231 - protein, 254 aa, Artificial Sequence
  anti-CD3 sequences
EVQLVESGGGLVQPGGSLRLSCAASGFTFSTYAMNWVRQAPGKGLEWVGRIRSKYNNYATYYADSVKGRFTISRDDSKNTLYLQMNSLRAEDTAVYYCVRHGNFGPSYVSWFAYWGQGTLVTVSSGKPGSGKPGSGKPGSGKPGSQAVVTQEPSLTVSPGGTVTLTCGSSTGAVTTSNYANWVQQKPGKSPRGLIGGTNKRAPGVPARFSGSLLGGKAALTISGAQPEDEADYYCALWYSNHWVFGGGTKLTVL

SEQ ID NO: 232 - protein, 125 aa, Artificial Sequence
  anti-CD3 sequences
EVQLVESGGGLVQPGGSLRLSCAASGFTFSTYAMNWVRQAPGKGLEWVGRIRSKYNNYATYYADSVKGRFTISRDDSKNTLYLQMNSLRAEDTAVYYCVRHGNFGPSYVSWFAYWGQGTLVTVSS

SEQ ID NO: 233 - protein, 109 aa, Artificial Sequence; identical to SEQ ID NO: 5
  anti-CD3 sequences

SEQ ID NO: 234 - protein, 262 aa, Artificial Sequence
  anti-CD3 sequences
EVQLVESGGGLVQPGGSLRLSCAASGFTFSTYAMNWVRQAPGKGLEWVGRIRSKYNNYATYYADSVKGRFTISRDDSKNTLYLQMNSLRAEDTAVYYCVRHGNFGDEYVSWFAYWGQGTLVTVSSGKPGSGKPGSGKPGSGKPGSQAVVTQEPSLTVSPGGTVTLTCGSSTGAVTTSNYANWVQQKPGKSPRGLIGGTNKRAPGVPARFSGSLLGGKAALTISGAQPEDEADYYCALWYSNHWVFGGGTKLTVLGSHHHHHH

SEQ ID NO: 235 - protein, 254 aa, Artificial Sequence; identical to SEQ ID NO: 27
  anti-CD3 sequences

SEQ ID NO: 236 - protein, 125 aa, Artificial Sequence; identical to SEQ ID NO: 19
  anti-CD3 sequences

SEQ ID NO: 237 - protein, 109 aa, Artificial Sequence; identical to SEQ ID NO: 5
  anti-CD3 sequences

SEQ ID NO: 238 - protein, 262 aa, Artificial Sequence
  anti-CD3 sequences
EVQLVESGGGLVQPGGSLRLSCAASGFTFSTYAMNWVRQAPGKGLEWVGRIRSKYNNYATYYADSVKGRFTISRDDSKNTLYLQMNSLRAEDTAVYYCVRHGNFGDPYVSWFAYWGQGTLVTVSSGKPGSGKPGSGKPGSGKPGSQAVVTQEPSLTVSPGGTVTLTCGSSTGAVTTSNYANWVQQKPGKSPRGLIGGTNKRAPGVPARFSGSLLGGKAALTISGAQPEDEADYYCALWYSNHWVFGGGTKLTVLGSHHHHHH

SEQ ID NO: 239 - protein, 254 aa, Artificial Sequence; identical to SEQ ID NO: 36
  anti-CD3 sequences

SEQ ID NO: 240 - protein, 125 aa, Artificial Sequence; identical to SEQ ID NO: 28
  anti-CD3 sequences

SEQ ID NO: 241 - protein, 109 aa, Artificial Sequence; identical to SEQ ID NO: 5
  anti-CD3 sequences

SEQ ID NO: 242 - protein, 262 aa, Artificial Sequence; identical to SEQ ID NO: 226
  anti-CD3 sequences

SEQ ID NO: 243 - protein, 254 aa, Artificial Sequence; identical to SEQ ID NO: 18
  anti-CD3 sequences

SEQ ID NO: 244 - protein, 125 aa, Artificial Sequence; identical to SEQ ID NO: 10
  anti-CD3 sequences

SEQ ID NO: 245 - protein, 109 aa, Artificial Sequence; identical to SEQ ID NO: 5
  anti-CD3 sequences

SEQ ID NO: 246 - protein, 262 aa, Artificial Sequence
  anti-CD3 sequences
EVQLVESGGGLVQPGGSLRLSCAASGFTFSTYAMNWVRQAPGKGLEWVGRIRSKYNNYATAYADSVKGRFTISRDDSKNTLYLQMNSLRAEDTAVYYCVRHGNFGDSYVSWFAYWGQGTLVTVSSGKPGSGKPGSGKPGSGKPGSQAVVTQEPSLTVSPGGTVTLTCGSSTGAVTTSNYANWVQQKPGKSPRGLIGGTNKRAPGVPARFSGSLLGGKAALTISGAQPEDEADYYCALWYSNHWVFGGGTKLTVLGSHHHHHH

SEQ ID NO: 247 - protein, 254 aa, Artificial Sequence
  anti-CD3 sequences
EVQLVESGGGLVQPGGSLRLSCAASGFTFSTYAMNWVRQAPGKGLEWVGRIRSKYNNYATAYADSVKGRFTISRDDSKNTLYLQMNSLRAEDTAVYYCVRHGNFGDSYVSWFAYWGQGTLVTVSSGKPGSGKPGSGKPGSGKPGSQAVVTQEPSLTVSPGGTVTLTCGSSTGAVTTSNYANWVQQKPGKSPRGLIGGTNKRAPGVPARFSGSLLGGKAALTISGAQPEDEADYYCALWYSNHWVFGGGTKLTVL

SEQ ID NO: 248 - protein, 125 aa, Artificial Sequence
  anti-CD3 sequences
EVQLVESGGGLVQPGGSLRLSCAASGFTFSTYAMNWVRQAPGKGLEWVGRIRSKYNNYATAYADSVKGRFTISRDDSKNTLYLQMNSLRAEDTAVYYCVRHGNFGDSYVSWFAYWGQGTLVTVSS

SEQ ID NO: 249 - protein, 109 aa, Artificial Sequence; identical to SEQ ID NO: 5
  anti-CD3 sequences

SEQ ID NO: 250 - protein, 262 aa, Artificial Sequence
  anti-CD3 sequences
EVQLVESGGGLVQPGGSLRLSCAASGFTFSTYAMNWVRQAPGKGLEWVGRIRSKYNNYATYYADSVKGRFTISRDDSKNTLYLQMNSLRAEDTAVYYCVRHGNFGESYVSWFAYWGQGTLVTVSSGKPGSGKPGSGKPGSGKPGSQAVVTQEPSLTVSPGGTVTLTCGSSTGAVTTSNYANWVQQKPGKSPRGLIGGTNKRAPGVPARFSGSLLGGKAALTISGAQPEDEADYYCALWYSNHWVFGGGTKLTVLGSHHHHHH

SEQ ID NO: 251 - protein, 254 aa, Artificial Sequence
  anti-CD3 sequences
EVQLVESGGGLVQPGGSLRLSCAASGFTFSTYAMNWVRQAPGKGLEWVGRIRSKYNNYATYYADSVKGRFTISRDDSKNTLYLQMNSLRAEDTAVYYCVRHGNFGESYVSWFAYWGQGTLVTVSSGKPGSGKPGSGKPGSGKPGSQAVVTQEPSLTVSPGGTVTLTCGSSTGAVTTSNYANWVQQKPGKSPRGLIGGTNKRAPGVPARFSGSLLGGKAALTISGAQPEDEADYYCALWYSNHWVFGGGTKLTVL

SEQ ID NO: 252 - protein, 125 aa, Artificial Sequence
  anti-CD3 sequences
EVQLVESGGGLVQPGGSLRLSCAASGFTFSTYAMNWVRQAPGKGLEWVGRIRSKYNNYATYYADSVKGRFTISRDDSKNTLYLQMNSLRAEDTAVYYCVRHGNFGESYVSWFAYWGQGTLVTVSS

SEQ ID NO: 253 - protein, 109 aa, Artificial Sequence; identical to SEQ ID NO: 5
  anti-CD3 sequences

SEQ ID NO: 254 - protein, 262 aa, Artificial Sequence
  anti-CD3 sequences
EVQLVESGGGLVQPGGSLRLSCAASGFTFSTYAMNWVRQAPGKGLEWVGRIRSKYNNYATYYADSVKGRFTISRDDSKNTLYLQMNSLRAEDTAVYYCVRHGNFGQSYVSWFAYWGQGTLVTVSSGKPGSGKPGSGKPGSGKPGSQAVVTQEPSLTVSPGGTVTLTCGSSTGAVTTSNYANWVQQKPGKSPRGLIGGTNKRAPGVPARFSGSLLGGKAALTISGAQPEDEADYYCALWYSNHWVFGGGTKLTVLGSHHHHHH

SEQ ID NO: 255 - protein, 254 aa, Artificial Sequence
  anti-CD3 sequences
EVQLVESGGGLVQPGGSLRLSCAASGFTFSTYAMNWVRQAPGKGLEWVGRIRSKYNNYATYYADSVKGRFTISRDDSKNTLYLQMNSLRAEDTAVYYCVRHGNFGQSYVSWFAYWGQGTLVTVSSGKPGSGKPGSGKPGSGKPGSQAVVTQEPSLTVSPGGTVTLTCGSSTGAVTTSNYANWVQQKPGKSPRGLIGGTNKRAPGVPARFSGSLLGGKAALTISGAQPEDEADYYCALWYSNHWVFGGGTKLTVL

SEQ ID NO: 256 - protein, 125 aa, Artificial Sequence
  anti-CD3 sequences
EVQLVESGGGLVQPGGSLRLSCAASGFTFSTYAMNWVRQAPGKGLEWVGRIRSKYNNYATYYADSVKGRFTISRDDSKNTLYLQMNSLRAEDTAVYYCVRHGNFGQSYVSWFAYWGQGTLVTVSS

SEQ ID NO: 257 - protein, 109 aa, Artificial Sequence; identical to SEQ ID NO: 5
  anti-CD3 sequences

SEQ ID NO: 258 - protein, 262 aa, Artificial Sequence
  anti-CD3 sequences
EVQLVESGGGLVQPGGSLRLSCAASGFTFSTYAMNWVRQAPGKGLEWVGRIRSKYNNYATYYADSVKGRFTISRDDSKNTLYLQMNSLRAEDTAVYYCVRHGNFGDNYVSWFAYWGQGTLVTVSSGKPGSGKPGSGKPGSGKPGSQAVVTQEPSLTVSPGGTVTLTCGSSTGAVTTSNYANWVQQKPGKSPRGLIGGTNKRAPGVPARFSGSLLGGKAALTISGAQPEDEADYYCALWYSNHWVFGGGTKLTVLGSHHHHHH

SEQ ID NO: 259 - protein, 254 aa, Artificial Sequence
  anti-CD3 sequences
EVQLVESGGGLVQPGGSLRLSCAASGFTFSTYAMNWVRQAPGKGLEWVGRIRSKYNNYATYYADSVKGRFTISRDDSKNTLYLQMNSLRAEDTAVYYCVRHGNFGDNYVSWFAYWGQGTLVTVSSGKPGSGKPGSGKPGSGKPGSQAVVTQEPSLTVSPGGTVTLTCGSSTGAVTTSNYANWVQQKPGKSPRGLIGGTNKRAPGVPARFSGSLLGGKAALTISGAQPEDEADYYCALWYSNHWVFGGGTKLTVL

SEQ ID NO: 260 - protein, 125 aa, Artificial Sequence
  anti-CD3 sequences
EVQLVESGGGLVQPGGSLRLSCAASGFTFSTYAMNWVRQAPGKGLEWVGRIRSKYNNYATYYADSVKGRFTISRDDSKNTLYLQMNSLRAEDTAVYYCVRHGNFGDNYVSWFAYWGQGTLVTVSS

SEQ ID NO: 261 - protein, 109 aa, Artificial Sequence; identical to SEQ ID NO: 5
  anti-CD3 sequences

SEQ ID NO: 262 - protein, 262 aa, Artificial Sequence
  anti-CD3 sequences
EVQLVESGGGLVQPGGSLRLSCAASGFTFSTYAMNWVRQAPGKGLEWVGRIRSKYNNYATYYADSVKGRFTISRDDSKNTLYLQMNSLRAEDTAVYYCVRHGNFGDQYVSWFAYWGQGTLVTVSSGKPGSGKPGSGKPGSGKPGSQAVVTQEPSLTVSPGGTVTLTCGSSTGAVTTSNYANWVQQKPGKSPRGLIGGTNKRAPGVPARFSGSLLGGKAALTISGAQPEDEADYYCALWYSNHWVFGGGTKLTVLGSHHHHHH

SEQ ID NO: 263 - protein, 254 aa, Artificial Sequence
  anti-CD3 sequences
EVQLVESGGGLVQPGGSLRLSCAASGFTFSTYAMNWVRQAPGKGLEWVGRIRSKYNNYATYYADSVKGRFTISRDDSKNTLYLQMNSLRAEDTAVYYCVRHGNFGDQYVSWFAYWGQGTLVTVSSGKPGSGKPGSGKPGSGKPGSQAVVTQEPSLTVSPGGTVTLTCGSSTGAVTTSNYANWVQQKPGKSPRGLIGGTNKRAPGVPARFSGSLLGGKAALTISGAQPEDEADYYCALWYSNHWVFGGGTKLTVL

SEQ ID NO: 264 - protein, 125 aa, Artificial Sequence
  anti-CD3 sequences
EVQLVESGGGLVQPGGSLRLSCAASGFTFSTYAMNWVRQAPGKGLEWVGRIRSKYNNYATYYADSVKGRFTISRDDSKNTLYLQMNSLRAEDTAVYYCVRHGNFGDQYVSWFAYWGQGTLVTVSS

SEQ ID NO: 265 - protein, 109 aa, Artificial Sequence; identical to SEQ ID NO: 5
  anti-CD3 sequences

SEQ ID NO: 266 - protein, 262 aa, Artificial Sequence
  anti-CD3 sequences
EVQLVESGGGLVQPGGSLRLSCAASGFTFSTYAMNWVRQAPGKGLEWVGRIRSKANNYATYYADSVKGRFTISRDDSKNTLYLQMNSLRAEDTAVYYCVRHGNFGDSYVSWFDYWGQGTLVTVSSGKPGSGKPGSGKPGSGKPGSQAVVTQEPSLTVSPGGTVTLTCGSSTGAVTTSNYANWVQQKPGKSPRGLIGGTNKRAPGVPARFSGSLLGGKAALTISGAQPEDEADYYCALWYSNHWVFGGGTKLTVLGSHHHHHH

SEQ ID NO: 267 - protein, 254 aa, Artificial Sequence
  anti-CD3 sequences
EVQLVESGGGLVQPGGSLRLSCAASGFTFSTYAMNWVRQAPGKGLEWVGRIRSKANNYATYYADSVKGRFTISRDDSKNTLYLQMNSLRAEDTAVYYCVRHGNFGDSYVSWFDYWGQGTLVTVSSGKPGSGKPGSGKPGSGKPGSQAVVTQEPSLTVSPGGTVTLTCGSSTGAVTTSNYANWVQQKPGKSPRGLIGGTNKRAPGVPARFSGSLLGGKAALTISGAQPEDEADYYCALWYSNHWVFGGGTKLTVL

SEQ ID NO: 268 - protein, 125 aa, Artificial Sequence
  anti-CD3 sequences
EVQLVESGGGLVQPGGSLRLSCAASGFTFSTYAMNWVRQAPGKGLEWVGRIRSKANNYATYYADSVKGRFTISRDDSKNTLYLQMNSLRAEDTAVYYCVRHGNFGDSYVSWFDYWGQGTLVTVSS

SEQ ID NO: 269 - protein, 109 aa, Artificial Sequence; identical to SEQ ID NO: 5
  anti-CD3 sequences

SEQ ID NO: 270 - protein, 262 aa, Artificial Sequence
  anti-CD3 sequences
EVQLVESGGGLVQPGGSLRLSCAASGFTFSTYAMNWVRQAPGKGLEWVGRIRSKYNNYATAYADSVKGRFTISRDDSKNTLYLQMNSLRAEDTAVYYCVRHGNFGDSYVSWFDYWGQGTLVTVSSGKPGSGKPGSGKPGSGKPGSQAVVTQEPSLTVSPGGTVTLTCGSSTGAVTTSNYANWVQQKPGKSPRGLIGGTNKRAPGVPARFSGSLLGGKAALTISGAQPEDEADYYCALWYSNHWVFGGGTKLTVLGSHHHHHH

SEQ ID NO: 271 - protein, 254 aa, Artificial Sequence
  anti-CD3 sequences
EVQLVESGGGLVQPGGSLRLSCAASGFTFSTYAMNWVRQAPGKGLEWVGRIRSKYNNYATAYADSVKGRFTISRDDSKNTLYLQMNSLRAEDTAVYYCVRHGNFGDSYVSWFDYWGQGTLVTVSSGKPGSGKPGSGKPGSGKPGSQAVVTQEPSLTVSPGGTVTLTCGSSTGAVTTSNYANWVQQKPGKSPRGLIGGTNKRAPGVPARFSGSLLGGKAALTISGAQPEDEADYYCALWYSNHWVFGGGTKLTVL

SEQ ID NO: 272 - protein, 125 aa, Artificial Sequence
  anti-CD3 sequences
EVQLVESGGGLVQPGGSLRLSCAASGFTFSTYAMNWVRQAPGKGLEWVGRIRSKYNNYATAYADSVKGRFTISRDDSKNTLYLQMNSLRAEDTAVYYCVRHGNFGDSYVSWFDYWGQGTLVTVSS

SEQ ID NO: 273 - protein, 109 aa, Artificial Sequence; identical to SEQ ID NO: 5
  anti-CD3 sequences

SEQ ID NO: 274 - protein, 262 aa, Artificial Sequence
  anti-CD3 sequences
EVQLVESGGGLVQPGGSLRLSCAASGFTFSTYAMNWVRQAPGKGLEWVGRIRSKYNNYATYYADSVKGRFTISRDDSKNTLYLQMNSLRAEDTAVYYCVRHGNFGASYVSWFDYWGQGTLVTVSSGKPGSGKPGSGKPGSGKPGSQAVVTQEPSLTVSPGGTVTLTCGSSTGAVTTSNYANWVQQKPGKSPRGLIGGTNKRAPGVPARFSGSLLGGKAALTISGAQPEDEADYYCALWYSNHWVFGGGTKLTVLGSHHHHHH

SEQ ID NO: 275 - protein, 254 aa, Artificial Sequence
  anti-CD3 sequences
EVQLVESGGGLVQPGGSLRLSCAASGFTFSTYAMNWVRQAPGKGLEWVGRIRSKYNNYATYYADSVKGRFTISRDDSKNTLYLQMNSLRAEDTAVYYCVRHGNFGASYVSWFDYWGQGTLVTVSSGKPGSGKPGSGKPGSGKPGSQAVVTQEPSLTVSPGGTVTLTCGSSTGAVTTSNYANWVQQKPGKSPRGLIGGTNKRAPGVPARFSGSLLGGKAALTISGAQPEDEADYYCALWYSNHWVFGGGTKLTVL

SEQ ID NO: 276 - protein, 125 aa, Artificial Sequence
  anti-CD3 sequences
EVQLVESGGGLVQPGGSLRLSCAASGFTFSTYAMNWVRQAPGKGLEWVGRIRSKYNNYATYYADSVKGRFTISRDDSKNTLYLQMNSLRAEDTAVYYCVRHGNFGASYVSWFDYWGQGTLVTVSS

SEQ ID NO: 277 - protein, 109 aa, Artificial Sequence; identical to SEQ ID NO: 5
  anti-CD3 sequences

SEQ ID NO: 278 - protein, 262 aa, Artificial Sequence
  anti-CD3 sequences
EVQLVESGGGLVQPGGSLRLSCAASGFTFSTYAMNWVRQAPGKGLEWVGRIRSKYNNYATYYADSVKGRFTISRDDSKNTLYLQMNSLRAEDTAVYYCVRHGNFGQSYVSWFDYWGQGTLVTVSSGKPGSGKPGSGKPGSGKPGSQAVVTQEPSLTVSPGGTVTLTCGSSTGAVTTSNYANWVQQKPGKSPRGLIGGTNKRAPGVPARFSGSLLGGKAALTISGAQPEDEADYYCALWYSNHWVFGGGTKLTVLGSHHHHHH

SEQ ID NO: 279 - protein, 254 aa, Artificial Sequence
  anti-CD3 sequences
EVQLVESGGGLVQPGGSLRLSCAASGFTFSTYAMNWVRQAPGKGLEWVGRIRSKYNNYATYYADSVKGRFTISRDDSKNTLYLQMNSLRAEDTAVYYCVRHGNFGQSYVSWFDYWGQGTLVTVSSGKPGSGKPGSGKPGSGKPGSQAVVTQEPSLTVSPGGTVTLTCGSSTGAVTTSNYANWVQQKPGKSPRGLIGGTNKRAPGVPARFSGSLLGGKAALTISGAQPEDEADYYCALWYSNHWVFGGGTKLTVL

SEQ ID NO: 280 - protein, 125 aa, Artificial Sequence
  anti-CD3 sequences
EVQLVESGGGLVQPGGSLRLSCAASGFTFSTYAMNWVRQAPGKGLEWVGRIRSKYNNYATYYADSVKGRFTISRDDSKNTLYLQMNSLRAEDTAVYYCVRHGNFGQSYVSWFDYWGQGTLVTVSS

SEQ ID NO: 281 - protein, 109 aa, Artificial Sequence; identical to SEQ ID NO: 5
  anti-CD3 sequences

SEQ ID NO: 282 - protein, 262 aa, Artificial Sequence
  anti-CD3 sequences
EVQLVESGGGLVQPGGSLRLSCAASGFTFSTYAMNWVRQAPGKGLEWVGRIRSKYNNYATYYADSVKGRFTISRDDSKNTLYLQMNSLRAEDTAVYYCVRHGNFGDEYVSWFDYWGQGTLVTVSSGKPGSGKPGSGKPGSGKPGSQAVVTQEPSLTVSPGGTVTLTCGSSTGAVTTSNYANWVQQKPGKSPRGLIGGTNKRAPGVPARFSGSLLGGKAALTISGAQPEDEADYYCALWYSNHWVFGGGTKLTVLGSHHHHHH

SEQ ID NO: 283 - protein, 254 aa, Artificial Sequence
  anti-CD3 sequences
EVQLVESGGGLVQPGGSLRLSCAASGFTFSTYAMNWVRQAPGKGLEWVGRIRSKYNNYATYYADSVKGRFTISRDDSKNTLYLQMNSLRAEDTAVYYCVRHGNFGDEYVSWFDYWGQGTLVTVSSGKPGSGKPGSGKPGSGKPGSQAVVTQEPSLTVSPGGTVTLTCGSSTGAVTTSNYANWVQQKPGKSPRGLIGGTNKRAPGVPARFSGSLLGGKAALTISGAQPEDEADYYCALWYSNHWVFGGGTKLTVL

SEQ ID NO: 284 - protein, 125 aa, Artificial Sequence
  anti-CD3 sequences
EVQLVESGGGLVQPGGSLRLSCAASGFTFSTYAMNWVRQAPGKGLEWVGRIRSKYNNYATYYADSVKGRFTISRDDSKNTLYLQMNSLRAEDTAVYYCVRHGNFGDEYVSWFDYWGQGTLVTVSS

SEQ ID NO: 285 - protein, 109 aa, Artificial Sequence; identical to SEQ ID NO: 5
  anti-CD3 sequences

SEQ ID NO: 286 - protein, 262 aa, Artificial Sequence
  anti-CD3 sequences
EVQLVESGGGLVQPGGSLRLSCAASGFTFSTYAMNWVRQAPGKGLEWVGRIRSKYNNYATYYADSVKGRFTISRDDSKNTLYLQMNSLRAEDTAVYYCVRHGNFGDNYVSWFDYWGQGTLVTVSSGKPGSGKPGSGKPGSGKPGSQAVVTQEPSLTVSPGGTVTLTCGSSTGAVTTSNYANWVQQKPGKSPRGLIGGTNKRAPGVPARFSGSLLGGKAALTISGAQPEDEADYYCALWYSNHWVFGGGTKLTVLGSHHHHHH

SEQ ID NO: 287 - protein, 254 aa, Artificial Sequence
  anti-CD3 sequences
EVQLVESGGGLVQPGGSLRLSCAASGFTFSTYAMNWVRQAPGKGLEWVGRIRSKYNNYATYYADSVKGRFTISRDDSKNTLYLQMNSLRAEDTAVYYCVRHGNFGDNYVSWFDYWGQGTLVTVSSGKPGSGKPGSGKPGSGKPGSQAVVTQEPSLTVSPGGTVTLTCGSSTGAVTTSNYANWVQQKPGKSPRGLIGGTNKRAPGVPARFSGSLLGGKAALTISGAQPEDEADYYCALWYSNHWVFGGGTKLTVL

SEQ ID NO: 288 - protein, 125 aa, Artificial Sequence
  anti-CD3 sequences
EVQLVESGGGLVQPGGSLRLSCAASGFTFSTYAMNWVRQAPGKGLEWVGRIRSKYNNYATYYADSVKGRFTISRDDSKNTLYLQMNSLRAEDTAVYYCVRHGNFGDNYVSWFDYWGQGTLVTVSS

SEQ ID NO: 289 - protein, 109 aa, Artificial Sequence; identical to SEQ ID NO: 5
  anti-CD3 sequences

SEQ ID NO: 290 - protein, 262 aa, Artificial Sequence
  anti-CD3 sequences
EVQLVESGGGLVQPGGSLRLSCAASGFTFSTYAMNWVRQAPGKGLEWVGRIRSKYNNYATYYADSVKGRFTISRDDSKNTLYLQMNSLRAEDTAVYYCVRHGNFGDPYVSWFDYWGQGTLVTVSSGKPGSGKPGSGKPGSGKPGSQAVVTQEPSLTVSPGGTVTLTCGSSTGAVTTSNYANWVQQKPGKSPRGLIGGTNKRAPGVPARFSGSLLGGKAALTISGAQPEDEADYYCALWYSNHWVFGGGTKLTVLGSHHHHHH

SEQ ID NO: 291 - protein, 254 aa, Artificial Sequence
  anti-CD3 sequences
EVQLVESGGGLVQPGGSLRLSCAASGFTFSTYAMNWVRQAPGKGLEWVGRIRSKYNNYATYYADSVKGRFTISRDDSKNTLYLQMNSLRAEDTAVYYCVRHGNFGDPYVSWFDYWGQGTLVTVSSGKPGSGKPGSGKPGSGKPGSQAVVTQEPSLTVSPGGTVTLTCGSSTGAVTTSNYANWVQQKPGKSPRGLIGGTNKRAPGVPARFSGSLLGGKAALTISGAQPEDEADYYCALWYSNHWVFGGGTKLTVL

SEQ ID NO: 292 - protein, 125 aa, Artificial Sequence
  anti-CD3 sequences
EVQLVESGGGLVQPGGSLRLSCAASGFTFSTYAMNWVRQAPGKGLEWVGRIRSKYNNYATYYADSVKGRFTISRDDSKNTLYLQMNSLRAEDTAVYYCVRHGNFGDPYVSWFDYWGQGTLVTVSS

SEQ ID NO: 293 - protein, 109 aa, Artificial Sequence; identical to SEQ ID NO: 5
  anti-CD3 sequences

SEQ ID NO: 294 - protein, 262 aa, Artificial Sequence
  anti-CD3 sequences
EVQLVESGGGLVQPGGSLRLSCAASGFTFSTYAMNWVRQAPGKGLEWVGRIRSKYNNYATYYADSVKGRFTISRDDSKNTLYLQMNSLRAEDTAVYYCVRHGNFGDQYVSWFDYWGQGTLVTVSSGKPGSGKPGSGKPGSGKPGSQAVVTQEPSLTVSPGGTVTLTCGSSTGAVTTSNYANWVQQKPGKSPRGLIGGTNKRAPGVPARFSGSLLGGKAALTISGAQPEDEADYYCALWYSNHWVFGGGTKLTVLGSHHHHHH

SEQ ID NO: 295 - protein, 254 aa, Artificial Sequence
  anti-CD3 sequences
EVQLVESGGGLVQPGGSLRLSCAASGFTFSTYAMNWVRQAPGKGLEWVGRIRSKYNNYATYYADSVKGRFTISRDDSKNTLYLQMNSLRAEDTAVYYCVRHGNFGDQYVSWFDYWGQGTLVTVSSGKPGSGKPGSGKPGSGKPGSQAVVTQEPSLTVSPGGTVTLTCGSSTGAVTTSNYANWVQQKPGKSPRGLIGGTNKRAPGVPARFSGSLLGGKAALTISGAQPEDEADYYCALWYSNHWVFGGGTKLTVL

SEQ ID NO: 296 - protein, 125 aa, Artificial Sequence
  anti-CD3 sequences
EVQLVESGGGLVQPGGSLRLSCAASGFTFSTYAMNWVRQAPGKGLEWVGRIRSKYNNYATYYADSVKGRFTISRDDSKNTLYLQMNSLRAEDTAVYYCVRHGNFGDQYVSWFDYWGQGTLVTVSS

SEQ ID NO: 297 - protein, 109 aa, Artificial Sequence; identical to SEQ ID NO: 5
  anti-CD3 sequences

SEQ ID NO: 298 - protein, 262 aa, Artificial Sequence
  anti-CD3 sequences
EVQLVESGGGLVQPGGSLRLSCAASGFTFSTYAMNWVRQAPGKGLEWVGRIRSKANNYATAYADSVKGRFTISRDDSKNTLYLQMNSLRAEDTAVYYCVRHGNFGDSYVSWFAYWGQGTLVTVSSGKPGSGKPGSGKPGSGKPGSQAVVTQEPSLTVSPGGTVTLTCGSSTGAVTTSNYANWVQQKPGKSPRGLIGGTNKRAPGVPARFSGSLLGGKAALTISGAQPEDEADYYCALWYSNHWVFGGGTKLTVLGSHHHHHH

SEQ ID NO: 299 - protein, 254 aa, Artificial Sequence
  anti-CD3 sequences
EVQLVESGGGLVQPGGSLRLSCAASGFTFSTYAMNWVRQAPGKGLEWVGRIRSKANNYATAYADSVKGRFTISRDDSKNTLYLQMNSLRAEDTAVYYCVRHGNFGDSYVSWFAYWGQGTLVTVSSGKPGSGKPGSGKPGSGKPGSQAVVTQEPSLTVSPGGTVTLTCGSSTGAVTTSNYANWVQQKPGKSPRGLIGGTNKRAPGVPARFSGSLLGGKAALTISGAQPEDEADYYCALWYSNHWVFGGGTKLTVL

SEQ ID NO: 300 - protein, 125 aa, Artificial Sequence
  anti-CD3 sequences
EVQLVESGGGLVQPGGSLRLSCAASGFTFSTYAMNWVRQAPGKGLEWVGRIRSKANNYATAYADSVKGRFTISRDDSKNTLYLQMNSLRAEDTAVYYCVRHGNFGDSYVSWFAYWGQGTLVTVSS

SEQ ID NO: 301 - protein, 109 aa, Artificial Sequence; identical to SEQ ID NO: 5
  anti-CD3 sequences

SEQ ID NO: 302 - protein, 262 aa, Artificial Sequence
  anti-CD3 sequences
EVQLVESGGGLVQPGGSLRLSCAASGFTFSTYAMNWVRQAPGKGLEWVGRIRSKANNYATAYADSVKGRFTISRDDSKNTLYLQMNSLRAEDTAVYYCVRHGNFGASYVSWFAYWGQGTLVTVSSGKPGSGKPGSGKPGSGKPGSQAVVTQEPSLTVSPGGTVTLTCGSSTGAVTTSNYANWVQQKPGKSPRGLIGGTNKRAPGVPARFSGSLLGGKAALTISGAQPEDEADYYCALWYSNHWVFGGGTKLTVLGSHHHHHH

SEQ ID NO: 303 - protein, 254 aa, Artificial Sequence
  anti-CD3 sequences
EVQLVESGGGLVQPGGSLRLSCAASGFTFSTYAMNWVRQAPGKGLEWVGRIRSKANNYATAYADSVKGRFTISRDDSKNTLYLQMNSLRAEDTAVYYCVRHGNFGASYVSWFAYWGQGTLVTVSSGKPGSGKPGSGKPGSGKPGSQAVVTQEPSLTVSPGGTVTLTCGSSTGAVTTSNYANWVQQKPGKSPRGLIGGTNKRAPGVPARFSGSLLGGKAALTISGAQPEDEADYYCALWYSNHWVFGGGTKLTVL

SEQ ID NO: 304 - protein, 125 aa, Artificial Sequence
  anti-CD3 sequences
EVQLVESGGGLVQPGGSLRLSCAASGFTFSTYAMNWVRQAPGKGLEWVGRIRSKANNYATAYADSVKGRFTISRDDSKNTLYLQMNSLRAEDTAVYYCVRHGNFGASYVSWFAYWGQGTLVTVSS

SEQ ID NO: 305 - protein, 109 aa, Artificial Sequence; identical to SEQ ID NO: 5
  anti-CD3 sequences

SEQ ID NO: 306 - protein, 262 aa, Artificial Sequence
  anti-CD3 sequences
EVQLVESGGGLVQPGGSLRLSCAASGFTFSTYAMNWVRQAPGKGLEWVGRIRSKANNYATAYADSVKGRFTISRDDSKNTLYLQMNSLRAEDTAVYYCVRHGNFGQSYVSWFAYWGQGTLVTVSSGKPGSGKPGSGKPGSGKPGSQAVVTQEPSLTVSPGGTVTLTCGSSTGAVTTSNYANWVQQKPGKSPRGLIGGTNKRAPGVPARFSGSLLGGKAALTISGAQPEDEADYYCALWYSNHWVFGGGTKLTVLGSHHHHHH

SEQ ID NO: 307 - protein, 254 aa, Artificial Sequence
  anti-CD3 sequences
EVQLVESGGGLVQPGGSLRLSCAASGFTFSTYAMNWVRQAPGKGLEWVGRIRSKANNYATAYADSVKGRFTISRDDSKNTLYLQMNSLRAEDTAVYYCVRHGNFGQSYVSWFAYWGQGTLVTVSSGKPGSGKPGSGKPGSGKPGSQAVVTQEPSLTVSPGGTVTLTCGSSTGAVTTSNYANWVQQKPGKSPRGLIGGTNKRAPGVPARFSGSLLGGKAALTISGAQPEDEADYYCALWYSNHWVFGGGTKLTVL

SEQ ID NO: 308 - protein, 125 aa, Artificial Sequence
  anti-CD3 sequences
EVQLVESGGGLVQPGGSLRLSCAASGFTFSTYAMNWVRQAPGKGLEWVGRIRSKANNYATAYADSVKGRFTISRDDSKNTLYLQMNSLRAEDTAVYYCVRHGNFGQSYVSWFAYWGQGTLVTVSS

SEQ ID NO: 309 - protein, 109 aa, Artificial Sequence; identical to SEQ ID NO: 5
  anti-CD3 sequences

SEQ ID NO: 310 - protein, 262 aa, Artificial Sequence
  anti-CD3 sequences
EVQLVESGGGLVQPGGSLRLSCAASGFTFSTYAMNWVRQAPGKGLEWVGRIRSKANNYATAYADSVKGRFTISRDDSKNTLYLQMNSLRAEDTAVYYCVRHGNFGDSYVSWFDYWGQGTLVTVSSGKPGSGKPGSGKPGSGKPGSQAVVTQEPSLTVSPGGTVTLTCGSSTGAVTTSNYANWVQQKPGKSPRGLIGGTNKRAPGVPARFSGSLLGGKAALTISGAQPEDEADYYCALWYSNHWVFGGGTKLTVLGSHHHHHH

SEQ ID NO: 311 - protein, 254 aa, Artificial Sequence
  anti-CD3 sequences
EVQLVESGGGLVQPGGSLRLSCAASGFTFSTYAMNWVRQAPGKGLEWVGRIRSKANNYATAYADSVKGRFTISRDDSKNTLYLQMNSLRAEDTAVYYCVRHGNFGDSYVSWFDYWGQGTLVTVSSGKPGSGKPGSGKPGSGKPGSQAVVTQEPSLTVSPGGTVTLTCGSSTGAVTTSNYANWVQQKPGKSPRGLIGGTNKRAPGVPARFSGSLLGGKAALTISGAQPEDEADYYCALWYSNHWVFGGGTKLTVL

SEQ ID NO: 312 - protein, 125 aa, Artificial Sequence
  anti-CD3 sequences
EVQLVESGGGLVQPGGSLRLSCAASGFTFSTYAMNWVRQAPGKGLEWVGRIRSKANNYATAYADSVKGRFTISRDDSKNTLYLQMNSLRAEDTAVYYCVRHGNFGDSYVSWFDYWGQGTLVTVSS

SEQ ID NO: 313 - protein, 109 aa, Artificial Sequence; identical to SEQ ID NO: 5
  anti-CD3 sequences

SEQ ID NO: 314 - protein, 445 aa, Artificial Sequence; identical to SEQ ID NO: 82
  anti-CD3 sequences

SEQ ID NO: 315 - protein, 485 aa, Artificial Sequence; identical to SEQ ID NO: 104
  anti-CD3 sequences

SEQ ID NO: 316 - protein, 214 aa, Artificial Sequence; identical to SEQ ID NO: 84
  anti-CD3 sequences

SEQ ID NO: 317 - protein, 445 aa, Artificial Sequence; identical to SEQ ID NO: 85
  anti-CD3 sequences

SEQ ID NO: 318 - protein, 485 aa, Artificial Sequence; identical to SEQ ID NO: 104
  anti-CD3 sequences

SEQ ID NO: 319 - protein, 214 aa, Artificial Sequence; identical to SEQ ID NO: 87
  anti-CD3 sequences

SEQ ID NO: 320 - protein, 445 aa, Artificial Sequence; identical to SEQ ID NO: 85
  anti-CD3 sequences

SEQ ID NO: 321 - protein, 485 aa, Artificial Sequence; identical to SEQ ID NO: 92
  anti-CD3 sequences

SEQ ID NO: 322 - protein, 214 aa, Artificial Sequence; identical to SEQ ID NO: 84
  anti-CD3 sequences

SEQ ID NO: 323 - protein, 445 aa, Artificial Sequence; identical to SEQ ID NO: 85
  anti-CD3 sequences

SEQ ID NO: 324 - protein, 485 aa, Artificial Sequence; identical to SEQ ID NO: 89
  anti-CD3 sequences

SEQ ID NO: 325 - protein, 214 aa, Artificial Sequence; identical to SEQ ID NO: 84
  anti-CD3 sequences

SEQ ID NO: 326 - protein, 445 aa, Artificial Sequence; identical to SEQ ID NO: 85
  anti-CD3 sequences

SEQ ID NO: 327 - protein, 485 aa, Artificial Sequence; identical to SEQ ID NO: 92
  anti-CD3 sequences

SEQ ID NO: 328 - protein, 214 aa, Artificial Sequence; identical to SEQ ID NO: 87
  anti-CD3 sequences

SEQ ID NO: 329 - protein, 445 aa, Artificial Sequence; identical to SEQ ID NO: 85
  anti-CD3 sequences

SEQ ID NO: 330 - protein, 485 aa, Artificial Sequence; identical to SEQ ID NO: 89
  anti-CD3 sequences

SEQ ID NO: 331 - protein, 214 aa, Artificial Sequence; identical to SEQ ID NO: 87
  anti-CD3 sequences

SEQ ID NO: 332 - protein, 5 aa, Artificial Sequence
  useful linkers
GSGGS

SEQ ID NO: 333 - protein, 5 aa, Artificial Sequence
  useful linkers
GGGGS

SEQ ID NO: 334 - protein, 4 aa, Artificial Sequence
  useful linkers
GGGS

SEQ ID NO: 335 - protein, 485 aa, Artificial Sequence; identical to SEQ ID NO: 104
  XmAb18968 (412220) ScFc

SEQ ID NO: 336 - protein, 214 aa, Artificial Sequence; identical to SEQ ID NO: 84
  XmAb18968 (412220) LC

SEQ ID NO: 337 - protein, 445 aa, Artificial Sequence; identical to SEQ ID NO: 85
  XmAb18968 (412220) HC

SEQ ID NO: 338 - DNA, 1449 bp, Artificial Sequence
  XmAb18968 (412220) ScFv-Fc
cagctcgtcgagtctggaggtggcctcgtccagccaggcggtagtctgaggctctcatgcgctgccagcggattcacttttagcacatatgcgatgaattgggtcagacaggctccaggcaaagggctggagtgggtgggacggatcagaagtaagtataataattatgccacctattatgctgactccgtgaagggcagattcactatttctagggacgattccaagaacactctctacctgcaaatgaattccctgagggctgaggacaccgcggtctactattgcgtgcggcacggcaacttcggcgactcttacgtgtcttggttcgactattgggggcaagggactctcgtgacagtgagctccggtaagcctggtagcgggaaaccaggcagcggaaagcctggcagcggtaaaccaggctcccaggccgtggttacacaggaaccctccttgactgtgtcacctgggggcacagtcactcttacctgcggcagttccactggggccgtaacaacctctaactatgcgaattgggttcagcagaagccaggtaagagccctagggggttgataggtggaactaataaacgggcccccggggtgccagcccgcttcagtgggagtttgctggggggaaaggccgccctcaccatctcaggggctcaacccgaggatgaggcagactattactgcgccctgtggtactccaatcactgggtcttcggcgggggtacaaagctgactgtgctggagcccaaatctagcgacaaaactcacacatgcccaccgtgcccggcgcctcctgttgctggaccgtcagtcttcctcttccccccaaaacccaaggacaccctcatgatctcccggacccctgaggtcacatgcgtggtggtggacgtgaagcacgaagaccctgaggtcaagttcaactggtacgtggacggcgtggaggtgcataatgccaagacaaagccgcgggaggagcagtacaacagcacgtaccgtgtggtcagcgtcctcaccgtcctgcaccaggactggctgaatggcaaggagtacaagtgcaaggtctccaacaaagccctcccagcccccatcgagaaaaccatctccaaagccaaagggcagccccgagaaccacaggtgtataccctgcccccatcccgggagcagatgaccaagaaccaggtaaagttgacctgcctggtcaaaggcttctatcccagcgacatcgccgtggagtgggagagcaatgggcagccggagaacaactacaagaccacgcctcccgtgctggactccgacggctccttcttcctctatagcaagctcaccgtggacaagagcaggtggcagcaggggaacgtcttctcatgctccgtgatgcatgaggctctgcacaaccactacacgcagaagagcctctccctgtctccgggtaaa

SEQ ID NO: 339 - DNA, 642 bp, Artificial Sequence
  XmAb18968 (412220) LC
gacatcgtgatgacacagagtcccagctctctctcagcgagcgttggcgatagggtgactataacatgcagagcatcccaaaacgtggatacatgggtggcttggtaccaacagaagccaggtcagtctcccaaggccctgatttatagcgcatcctatcgctacagtggtgttcccgacaggtttaccgggtctggcagtggcaccgattttaccctgactatctcttccctgcaacccgaggacttcgcaacatatttctgccagcagtatgattcctaccccctgaccttcggcggaggcaccaaactcgaaattaagcgtacggtggccgcaccatctgtcttcatcttcccgccatctgatgagcagttgaaatctggaactgcctctgttgtgtgcctgctgaataacttctatcccagagaggccaaagtacagtggaaggtggataacgccctccaatcgggtaactcccaggagagtgtcacagagcaggacagcaaggacagcacctacagcctcagcagcaccctgacgctgagcaaagcagactacgagaaacacaaagtctacgcctgcgaagtcacccatcagggcctgagctcgcccgtcacaaagagcttcaacaggggagagtgt

SEQ ID NO: 340 - DNA, 1329 bp, Artificial Sequence
  XmAb18968 (412220) LC
cagttggtggagagcgggggcggcctcgtccagccggggggctcactgaggctctcctgtgcagccagcggattcgacttcagccgatcatggatgaattgggtgagacaggcacctggtaagggccttgagtgggtctctgagattaatccagactctagtaccattaattacgctacttcagtcaagggcaggtttacgatctcaagagacaacagcaagaatacgctgtacctccaaatgaactctcttagggctgaagatactgcagtgtactactgtgcacgatatgggaactggtttccgtattggggccagggcacgttggtgaccgtgtcttccgcaagcactaagggcccatcggtcttccccctggcaccctcctccaagagcacctctgggggcacagcggccctgggctgcctggtcaaggactacttccccgaaccggtgacggtgtcgtggaactcaggcgccctgaccagcggcgtgcacaccttcccggctgtcctacagtcctcaggactctactccctcagcagcgtggtgaccgtgccctccagcagcttgggcacccagacctacatctgcaacgtgaatcacaagcccagcgacaccaaggtggacaagaaagttgagcccaaatcttgtgacaaaactcacacatgcccaccgtgcccggcgcctcctgttgctggaccgtcagtcttcctcttccccccaaaacccaaggacaccctcatgatctcccggacccctgaggtcacatgcgtggtggtggacgtgaagcacgaagaccctgaggtcaagttcaactggtacgtggacggcgtggaggtgcataatgccaagacaaagccgcgggaggaggagtacaacagcacgtaccgtgtggtcagcgtcctcaccgtcctgcaccaggactggctgaatggcaaggagtacaagtgcaaggtctccaacaaagccctcccagcccccatcgagaaaaccatctccaaagccaaagggcagccccgagaaccacaggtgtataccctgcccccatcccgggaggagatgaccaagaaccaggtaagcttgacctgcgacgtcagcggcttctatcccagcgacatcgccgtggagtgggagagcgacgggcagccggagaacaactacaagaccacgcctcccgtgctggactccgacggctccttcttcctctatagcaagctcaccgtggacaagagcaggtgggagcagggggacgtcttctcatgctccgtgatgcatgaggctctgcacaaccactacacgcagaagagcctctccctgtctccgggtaaa

SEQ ID NO: 341 - protein, 504 aa, Artificial Sequence
  XmAb18968 (412220) ScFv-Fc
MGWSCIILFLVATATGVHSEVQLVESGGGLVQPGGSLRLSCAASGFTFSTYAMNWVRQAPGKGLEWVGRIRSKANNYATYYADSVKGRFTISRDDSKNTLYLQMNSLRAEDTAVYYCVRHGNFGDSYVSWFAYWGQGTLVTVSSGKPGSGKPGSGKPGSGKPGSQAVVTQEPSLTVSPGGTVTLTCGSSTGAVTTSNYANWVQQKPGKSPRGLIGGTNKRAPGVPARFSGSLLGGKAALTISGAQPEDEADYYCALWYSNHWVFGGGTKLTVLEPKSSDKTHTCPPCPAPPVAGPSVFLFPPKPKDTLMISRTPEVTCVVVDVKHEDPEVKFNWYVDGVEVHNAKTKPREEQYNSTYRVVSVLTVLHQDWLNGKEYKCKVSNKALPAPIEKTISKAKGQPREPQVYTLPPSREQMTKNQVKLTCLVKGFYPSDIAVEWESNGQPENNYKTTPPVLDSDGSFFLYSKLTVDKSRWQQGNVFSCSVMHEALHNHYTQKSLSLSPGK

SEQ ID NO: 342 - protein, 233 aa, Artificial Sequence
  XmAb18968 (412220) LC
MGWSCIILFLVATATGVHSDIVMTQSPSSLSASVGDRVTITCRASQNVDTWVAWYQQKPGQSPKALIYSASYRYSGVPDRFTGSGSGTDFTLTISSLQPEDFATYFCQQYDSYPLTFGGGTKLEIKRTVAAPSVFIFPPSDEQLKSGTASVVCLLNNFYPREAKVQWKVDNALQSGNSQESVTEQDSKDSTYSLSSTLTLSKADYEKHKVYACEVTHQGLSSPVTKSFNRGEC

SEQ ID NO: 343 - protein, 464 aa, Artificial Sequence
  XmAb18968 (412220) HC
MGWSCIILFLVATATGVHSEVQLVESGGGLVQPGGSLRLSCAASGFDFSRSWMNWVRQAPGKGLEWVSEINPDSSTINYATSVKGRFTISRDNSKNTLYLQMNSLRAEDTAVYYCARYGNWFPYWGQGTLVTVSSASTKGPSVFPLAPSSKSTSGGTAALGCLVKDYFPEPVTVSWNSGALTSGVHTFPAVLQSSGLYSLSSVVTVPSSSLGTQTYICNVNHKPSDTKVDKKVEPKSCDKTHTCPPCPAPPVAGPSVFLFPPKPKDTLMISRTPEVTCVVVDVKHEDPEVKFNWYVDGVEVHNAKTKPREEEYNSTYRVVSVLTVLHQDWLNGKEYKCKVSNKALPAPIEKTISKAKGQPREPQVYTLPPSREEMTKNQVSLTCDVSGFYPSDIAVEWESDGQPENNYKTTPPVLDSDGSFFLYSKLTVDKSRWEQGDVFSCSVMHEALHNHYTQKSLSLSPGK

SEQ ID NO: 344 - DNA, 1512 bp, Artificial Sequence
  XmAb18968 (412220) ScFv-Fc
atgggatggagctgtatcatcctcttcttggtagcaacagctacaggtgtacactccgaagttcagctcgtcgagtctggaggtggcctcgtccagccaggcggtagtctgaggctctcatgcgctgccagcggattcacttttagcacatatgcgatgaattgggtcagacaggctccaggcaaagggctggagtgggtgggacggatcagaagtaagtataataattatgccacctattatgctgactccgtgaagggcagattcactatttctagggacgattccaagaacactctctacctgcaaatgaattccctgagggctgaggacaccgcggtctactattgcgtgcggcacggcaacttcggcgactcttacgtgtcttggttcgactattgggggcaagggactctcgtgacagtgagctccggtaagcctggtagcgggaaaccaggcagcggaaagcctggcagcggtaaaccaggctcccaggccgtggttacacaggaaccctccttgactgtgtcacctgggggcacagtcactcttacctgcggcagttccactggggccgtaacaacctctaactatgcgaattgggttcagcagaagccaggtaagagccctagggggttgataggtggaactaataaacgggcccccggggtgccagcccgcttcagtgggagtttgctggggggaaaggccgccctcaccatctcaggggctcaacccgaggatgaggcagactattactgcgccctgtggtactccaatcactgggtcttcggcgggggtacaaagctgactgtgctggagcccaaatctagcgacaaaactcacacatgcccaccgtgcccggcgcctcctgttgctggaccgtcagtcttcctcttccccccaaaacccaaggacaccctcatgatctcccggacccctgaggtcacatgcgtggtggtggacgtgaagcacgaagaccctgaggtcaagttcaactggtacgtggacggcgtggaggtgcataatgccaagacaaagccgcgggaggagcagtacaacagcacgtaccgtgtggtcagcgtcctcaccgtcctgcaccaggactggctgaatggcaaggagtacaagtgcaaggtctccaacaaagccctcccagcccccatcgagaaaaccatctccaaagccaaagggcagccccgagaaccacaggtgtataccctgcccccatcccgggagcagatgaccaagaaccaggtaaagttgacctgcctggtcaaaggcttctatcccagcgacatcgccgtggagtgggagagcaatgggcagccggagaacaactacaagaccacgcctcccgtgctggactccgacggctccttcttcctctatagcaagctcaccgtggacaagagcaggtggcagcaggggaacgtcttctcatgctccgtgatgcatgaggctctgcacaaccactacacgcagaagagcctctccctgtctccgggtaaa

SEQ ID NO: 345 - DNA, 699 bp, Artificial Sequence
  XmAb18968 (412220) LC
atgggatggagctgtatcatcctcttcttggtagcaacagctacaggtgtccacagcgacatcgtgatgacacagagtcccagctctctctcagcgagcgttggcgatagggtgactataacatgcagagcatcccaaaacgtggatacatgggtggcttggtaccaacagaagccaggtcagtctcccaaggccctgatttatagcgcatcctatcgctacagtggtgttcccgacaggtttaccgggtctggcagtggcaccgattttaccctgactatctcttccctgcaacccgaggacttcgcaacatatttctgccagcagtatgattcctaccccctgaccttcggcggaggcaccaaactcgaaattaagcgtacggtggccgcaccatctgtcttcatcttcccgccatctgatgagcagttgaaatctggaactgcctctgttgtgtgcctgctgaataacttctatcccagagaggccaaagtacagtggaaggtggataacgccctccaatcgggtaactcccaggagagtgtcacagagcaggacagcaaggacagcacctacagcctcagcagcaccctgacgctgagcaaagcagactacgagaaacacaaagtctacgcctgcgaagtcacccatcagggcctgagctcgcccgtcacaaagagcttcaacaggggagagtgt

SEQ ID NO: 346 - DNA, 1392 bp, Artificial Sequence
  XmAb18968 (412220) LC
atgggatggagctgtatcatcctcttcttggtagcaacagctacaggtgtccactccgaggttcagttggtggagagcgggggcggcctcgtccagccggggggctcactgaggctctcctgtgcagccagcggattcgacttcagccgatcatggatgaattgggtgagacaggcacctggtaagggccttgagtgggtctctgagattaatccagactctagtaccattaattacgctacttcagtcaagggcaggtttacgatctcaagagacaacagcaagaatacgctgtacctccaaatgaactctcttagggctgaagatactgcagtgtactactgtgcacgatatgggaactggtttccgtattggggccagggcacgttggtgaccgtgtcttccgcaagcactaagggcccatcggtcttccccctggcaccctcctccaagagcacctctgggggcacagcggccctgggctgcctggtcaaggactacttccccgaaccggtgacggtgtcgtggaactcaggcgccctgaccagcggcgtgcacaccttcccggctgtcctacagtcctcaggactctactccctcagcagcgtggtgaccgtgccctccagcagcttgggcacccagacctacatctgcaacgtgaatcacaagcccagcgacaccaaggtggacaagaaagttgagcccaaatcttgtgacaaaactcacacatgcccaccgtgcccggcgcctcctgttgctggaccgtcagtcttcctcttccccccaaaacccaaggacaccctcatgatctcccggacccctgaggtcacatgcgtggtggtggacgtgaagcacgaagaccctgaggtcaagttcaactggtacgtggacggcgtggaggtgcataatgccaagacaaagccgcgggaggaggagtacaacagcacgtaccgtgtggtcagcgtcctcaccgtcctgcaccaggactggctgaatggcaaggagtacaagtgcaaggtctccaacaaagccctcccagcccccatcgagaaaaccatctccaaagccaaagggcagccccgagaaccacaggtgtataccctgcccccatcccgggaggagatgaccaagaaccaggtaagcttgacctgcgacgtcagcggcttctatcccagcgacatcgccgtggagtgggagagcgacgggcagccggagaacaactacaagaccacgcctcccgtgctggactccgacggctccttcttcctctatagcaagctcaccgtggacaagagcaggtgggagcagggggacgtcttctcatgctccgtgatgcatgaggctctgcacaaccactacacgcagaagagcctctccctgtctccgggtaaa

SEQ ID NO: 347 - protein, 329 aa, Artificial Sequence
  Fab side HC (Bottle opener backbone 1)
ASTKGPSVFPLAPSSKSTSGGTAALGCLVKDYFPEPVTVSWNSGALTSGVHTFPAVLQSSGLYSLSSVVTVPSSSLGTQTYICNVNHKPSDTKVDKKVEPKSCDKTHTCPPCPAPPVAGPSVFLFPPKPKDTLMISRTPEVTCVVVDVKHEDPEVKFNWYVDGVEVHNAKTKPREEEYNSTYRVVSVLTVLHQDWLNGKEYKCKVSNKALPAPIEKTISKAKGQPREPQVYTLPPSREEMTKNQVSLTCDVSGFYPSDIAVEWESDGQPENNYKTTPPVLDSDGSFFLYSKLTVDKSRWEQGDVFSCSVMHEALHNHYTQKSLSLSPGK

SEQ ID NO: 348 - protein, 231 aa, Artificial Sequence
  scFv HC (Bottle opener backbone 1)
EPKSSDKTHTCPPCPAPPVAGPSVFLFPPKPKDTLMISRTPEVTCVVVDVKHEDPEVKFNWYVDGVEVHNAKTKPREEQYNSTYRVVSVLTVLHQDWLNGKEYKCKVSNKALPAPIEKTISKAKGQPREPQVYTLPPSREQMTKNQVKLTCLVKGFYPSDIAVEWESNGQPENNYKTTPPVLDSDGSFFLYSKLTVDKSRWQQGNVFSCSVMHEALHNHYTQKSLSLSPGK

SEQ ID NO: 349 - protein, 107 aa, Artificial Sequence [sequence omitted]

SEQ ID NO: 350 - protein, 231 aa, Artificial Sequence
  scFv HC (Bottle opener backbone 2)
EPKSSDKTHTCPPCPAPPVAGPSVFLFPPKPKDTLMISRTPEVTCVVVDVKHEDPEVKFNWYVDGVEVHNAKTKPREEQYNSTYRVVSVLTVLHQDWLNGKEYKCKVSNKALPAPIEKTISKAKGQPREPQVYTLPPSREEMTKNQVKLTCLVKGFYPSDIAVEWESNGQPENNYKTTPPVLDSDGSFFLYSKLTVDKSRWQQGNVFSCSVMHEALHNHYTQKSLSLSPGK

SEQ ID NO: 351 - protein, 329 aa, Artificial Sequence
  Fab side HC (Bottle opener backbone 3)
ASTKGPSVFPLAPSSKSTSGGTAALGCLVKDYFPEPVTVSWNSGALTSGVHTFPAVLQSSGLYSLSSVVTVPSSSLGTQTYICNVNHKPSDTKVDKKVEPKSCDKTHTCPPCPAPPVAGPSVFLFPPKPKDTLMISRTPEVTCVVVDVKHEDPEVKFNWYVDGVEVHNAKTKPREEEYNSTYRVVSVLTVLHQDWLNGKEYKCKVSNKALPAPIEKTISKAKGQPREPQVYTLPPSREEMTKNQVSLTCEVSGFYPSDIAVEWESDGQPENNYKTTPPVLDSDGSFFLYSKLTVDKSRWEQGDVFSCSVMHEALHNHYTQKSLSLSPGK

SEQ ID NO: 352 - protein, 231 aa, Artificial Sequence; identical to SEQ ID NO: 350
  scFv HC (Bottle opener backbone 3)

SEQ ID NO: 353 - protein, 330 aa, Artificial Sequence
  Fab side HC (Bottle opener backbone 4)
ASTKGPSVFPLAPSSKSTSGGTAALGCLVKDYFPEPVTVSWNSGALTSGVHTFPAVLQSSGLYSLSSVVTVPSSSLGTQTYICNVNHKPSDTKVDKKVEPKSCDKTHTCPPCPAPPVAGPSVFLFPPKPKDTLMISRTPEVTCVVVDVKHEDPEVKFNWYVDGVEVHNAKTKPREEEYNSTYRVVSVLTVLHQDWLNGKEYKCKVSNKALPAPIEKTISKAKGQPREPQVYTLPPSREEMTENEVSLTCLVKSGFYPSDIAVEWESDGQPENNYKTTPPVLDSDGSFFLYSKLEVDKSRWEQGDVFSCSVMHEALHNHYTQKSLSLSPGK

SEQ ID NO: 354 - protein, 231 aa, Artificial Sequence
  scFv HC (Bottle opener backbone 4)
EPKSSDKTHTCPPCPAPPVAGPSVFLFPPKPKDTLMISRTPEVTCVVVDVKHEDPEVKFNWYVDGVEVHNAKTKPREEQYNSTYRVVSVLTVLHQDWLNGKEYKCKVSNKALPAPIEKTISKAKGQPREPQVYTLPPSREEMTKNQVSLTCLVKGFYPSDIAVEWESNGQPENNYKTTPPVLDSKGSFFLYSKLTVDKSRWQQGNVFSCSVMHEALHNHYTQKSLSLSPGK

SEQ ID NO: 355 - protein, 107 aa, Artificial Sequence
  Variable light (vl) domain (H1L1) CD38 arm
DIVMTQSPSSLSASVGDRVTITCRASQNVDTNVAWYQQKPGQSPKALIYSASYRYSGVPDRFTGSGSGTDFTLTISSLQPEDFATYFCQQYDSYPLTFGGGTKLEIK

SEQ ID NO: 356 - protein, 339 aa, Homo Sapiens
MESRKDITNQEELWKMKPRRNLEEDDYLHKDTGETSMLKRPVLLHLHQTAHADEFDCPSELQHTQELFPQWHLPIKIAAIIASLTFLYTLLREVIHPLATSHQQYFYKIPILVINKVLPMVSITLLALVYLPGVIAAIVQLHNGTKYKKFPHWLDKWMLTRKQFGLLSFFFAVLHAIYSLSYPMRRSYRYKLLNWAYQQVQQNKEDAWIEHDVWRMEIYVSLGIVGLAILALLAVTSIPSVSDSLTWREFHYIQSKLGIVSLLLGTIHALIFAWNKWIDIKQFVWYTPPTFMIAVFLPIVVLIFKSILFLPCLRKKILKIRHGWEDVTKINKTEICSQL

SEQ ID NO: 357 - protein, 10 aa, Artificial Sequence
  Synthetic Polypeptide
RASSSVSYMH

SEQ ID NO: 358 - protein, 7 aa, Artificial Sequence
  Synthetic Polypeptide
STSNLAS

SEQ ID NO: 359 - protein, 9 aa, Artificial Sequence
  Synthetic Polypeptide
QQRRSFPYT

SEQ ID NO: 360 - protein, 5 aa, Artificial Sequence
  Synthetic Polypeptide
TYWIE

SEQ ID NO: 361 - protein, 17 aa, Artificial Sequence
  Synthetic Polypeptide
EILPGSGNTDFNEKFQG

SEQ ID NO: 362 - protein, 12 aa, Artificial Sequence
  Synthetic Polypeptide
WGYYGTRGYFNV

SEQ ID NO: 363 - protein, 17 aa, Artificial Sequence
  Synthetic Polypeptide
EILPGSGQTDFNEKFQG

SEQ ID NO: 364 - protein, 232 aa, Artificial Sequence
  Synthetic Polypeptide
MGWSCIILFLVATATGVHSEIVLTQSPATLSLSPGERATLSCRASSSVSYMHWFQQKPGQAPRLLIYSTSNLASGIPARFSGSGSGTDYTLTISSLEPEDFAVYYCQQRRSFPYTFGQGTKLEIKRTVAAPSVFIFPPSDEQLKSGTASVVCLLNNFYPREAKVQWKVDNALQSGNSQESVTEQDSKDSTYSLSSTLTLSKADYEKHKVYACEVTHQGLSSPVTKSFNRGEC

SEQ ID NO: 365 - protein, 469 aa, Artificial Sequence
  Synthetic Polypeptide
MGWSCIILFLVATATGVHSQVQLVQSGAEVKKPGASVKVSCKASGYTFSTYWIEWVRQAPGQRLEWMGEILPGSGNTDFNEKFQGRVTFTADTSSDTAYMELSSLRSEDTAVYYCTRWGYYGTRGYFNVWGQGTLVTVSSASTKGPSVFPLAPSSKSTSGGTAALGCLVKDYFPEPVTVSWNSGALTSGVHTFPAVLQSSGLYSLSSVVTVPSSSLGTQTYICNVNHKPSDTKVDKKVEPKSCDKTHTCPPCPAPPVAGPSVFLFPPKPKDTLMISRTPEVTCVVVDVKHEDPEVKFNWYVDGVEVHNAKTKPREEEYNSTYRVVSVLTVLHQDWLNGKEYKCKVSNKALPAPIEKTISKAKGQPREPQVYTLPPSREEMTKNQVSLTCDVSGFYPSDIAVEWESDGQPENNYKTTPPVLDSDGSFFLYSKLTVDKSRWEQGDVFSCSVMHEALHNHYTQKSLSLSPGK

SEQ ID NO: 366 - protein, 742 aa, Artificial Sequence
  Synthetic Polypeptide
MGWSCIILFLVATATGVHSQVQLVQSGAEVKKPGASVKVSCKASGYTFSTYWIEWVRQAPGQRLEWMGEILPGSGNTDFNEKFQGRVTFTADTSSDTAYMELSSLRSEDTAVYYCTRWGYYGTRGYFNVWGQGTLVTVSSASTKGPSVFPLAPSSKSTSGGTAALGCLVKDYFPEPVTVSWNSGALTSGVHTFPAVLQSSGLYSLSSVVTVPSSSLGTQTYICNVNHKPSNTKVDKKVEPKSCGGGGSGGGGSEVQLVESGGGLVQPGGSLRLSCAASGFTFSTYAMNWVRQAPGKGLEWVGRIRSKYNNYATYYADSVKGRFTISRDDSKNTLYLQMNSLRAEDTAVYYCVRHGNFGDSYVSWFAYWGQGTLVTVSSGKPGSGKPGSGKPGSGKPGSQAVVTQEPSLTVSPGGTVTLTCGSSTGAVTTSNYANWVQQKPGKSPRGLIGGTNKRAPGVPARFSGSLLGGKAALTISGAQPEDEADYYCALWYSNHWVFGGGTKLTVLGGGGSGGGGSKTHTCPPCPAPPVAGPSVFLFPPKPKDTLMISRTPEVTCVVVDVKHEDPEVKFNWYVDGVEVHNAKTKPREEQYNSTYRVVSVLTVLHQDWLNGKEYKCKVSNKALPAPIEKTISKAKGQPREPQVYTLPPSREQMTKNQVKLTCLVKGFYPSDIAVEWESNGQPENNYKTTPPVLDSDGSFFLYSKLTVDKSRWQQGNVFSCSVMHEALHNHYTQKSLSLSPGK

SEQ ID NO: 367 - protein, 745 aa, Artificial Sequence
  Synthetic Polypeptide
MDMRVPAQLLGLLLLWLRGARCQVQLVQSGAEVKKPGASVKVSCKASGYTFSTYWIEWVRQAPGQRLEWMGEILPGSGQTDFNEKFQGRVTFTADTSSDTAYMELSSLRSEDTAVYYCTRWGYYGTRGYFNVWGQGTLVTVSSASTKGPSVFPLAPSSKSTSGGTAALGCLVKDYFPEPVTVSWNSGALTSGVHTFPAVLQSSGLYSLSSVVTVPSSSLGTQTYICNVNHKPSNTKVDKKVEPKSCGGGGSGGGGSEVQLVESGGGLVQPGGSLRLSCAASGFTFSTYAMNWVRQAPGKGLEWVGRIRSKYNNYATYYADSVKGRFTISRDDSKNTLYLQMNSLRAEDTAVYYCVRHGNFGDSYVSWFAYWGQGTLVTVSSGKPGSGKPGSGKPGSGKPGSQAVVTQEPSLTVSPGGTVTLTCGSSTGAVTTSNYANWVQQKPGKSPRGLIGGTNKRAPGVPARFSGSLLGGKAALTISGAQPEDEADYYCALWYSNHWVFGGGTKLTVLGGGGSGGGGSKTHTCPPCPAPPVAGPSVFLFPPKPKDTLMISRTPEVTCVVVDVKHEDPEVKFNWYVDGVEVHNAKTKPCEEQYGSTYRCVSVLTVLHQDWLNGKEYKCKVSNKALPAPIEKTISKAKGQPREPQVYTLPPSREQMTKNQVKLTCLVKGFYPSDIAVEWESNGQPENNYKTTPPVLDSDGSFFLYSKLTVDKSRWQQGNVFSCSVMHEALHNHYTQKSLSLSPGK

SEQ ID NO: 368 - protein, 5 aa, Artificial Sequence
  Synthetic Polypeptide
NYGMN

SEQ ID NO: 369 - protein, 17 aa, Artificial Sequence
  Synthetic Polypeptide
WMNTYTGEPTYADKFQG

SEQ ID NO: 370 - protein, 12 aa, Artificial Sequence
  Synthetic Polypeptide
AGGQLRPGAMDY

SEQ ID NO: 371 - protein, 15 aa, Artificial Sequence
  Synthetic Polypeptide
KASQSVDYDGDSFMN

SEQ ID NO: 372 - protein, 7 aa, Artificial Sequence
  Synthetic Polypeptide
VASNLES

SEQ ID NO: 373 - protein, 9 aa, Artificial Sequence
  Synthetic Polypeptide
QQSNEEPPT

SEQ ID NO: 374 - protein, 237 aa, Artificial Sequence
  Synthetic Polypeptide
MGWSCIILFLVATATGVHSDIVLTQTPLSLSVTPGQPASISCKASQSVDYDGDSFMNWYLQKPGQPPQLLIYVASNLESGVPDRFSGSGSGTDFTLKISRVEAEDVGVYYCQQSNEEPPTFGQGTKLEIKRTVAAPSVFIFPPSDEQLKSGTASVVCLLNNFYPREAKVQWKVDNALQSGNSQESVTEQDSKDSTYSLSSTLTLSKADYEKHKVYACEVTHQGLSSPVTKSFNRGEC

SEQ ID NO: 375 - protein, 469 aa, Artificial Sequence
  Synthetic Polypeptide
MGWSCIILFLVATATGVHSEIQLVQSGAEVKKPGATVKISCKASGYTFTNYGMNWVQQAPGQGLEWMGWMNTYTGEPTYADKFQGRVTFTLDTSARTVYMELSSLRSEDTAVYFCARAGGQLRPGAMDYWGQGTMVTVSSASTKGPSVFPLAPSSKSTSGGTAALGCLVKDYFPEPVTVSWNSGALTSGVHTFPAVLQSSGLYSLSSVVTVPSSSLGTQTYICNVNHKPSDTKVDKKVEPKSCDKTHTCPPCPAPPVAGPSVFLFPPKPKDTLMISRTPEVTCVVVDVKHEDPEVKFNWYVDGVEVHNAKTKPREEEYNSTYRVVSVLTVLHQDWLNGKEYKCKVSNKALPAPIEKTISKAKGQPREPQVYTLPPSREEMTKNQVSLTCDVSGFYPSDIAVEWESDGQPENNYKTTPPVLDSDGSFFLYSKLTVDKSRWEQGDVFSCSVMHEALHNHYTQKSLSLSPGK

SEQ ID NO: 376 - protein, 742 aa, Artificial Sequence
  Synthetic Polypeptide
MGWSCIILFLVATATGVHSEIQLVQSGAEVKKPGATVKISCKASGYTFTNYGMNWVQQAPGQGLEWMGWMNTYTGEPTYADKFQGRVTFTLDTSARTVYMELSSLRSEDTAVYFCARAGGQLRPGAMDYWGQGTMVTVSSASTKGPSVFPLAPSSKSTSGGTAALGCLVKDYFPEPVTVSWNSGALTSGVHTFPAVLQSSGLYSLSSVVTVPSSSLGTQTYICNVNHKPSNTKVDKKVEPKSCGGGGSGGGGSEVQLVESGGGLVQPGGSLRLSCAASGFTFSTYAMNWVRQAPGKGLEWVGRIRSKYNNYATYYADSVKGRFTISRDDSKNTLYLQMNSLRAEDTAVYYCVRHGNFGDSYVSWFAYWGQGTLVTVSSGKPGSGKPGSGKPGSGKPGSQAVVTQEPSLTVSPGGTVTLTCGSSTGAVTTSNYANWVQQKPGKSPRGLIGGTNKRAPGVPARFSGSLLGGKAALTISGAQPEDEADYYCALWYSNHWVFGGGTKLTVLGGGGSGGGGSKTHTCPPCPAPPVAGPSVFLFPPKPKDTLMISRTPEVTCVVVDVKHEDPEVKFNWYVDGVEVHNAKTKPREEQYNSTYRVVSVLTVLHQDWLNGKEYKCKVSNKALPAPIEKTISKAKGQPREPQVYTLPPSREQMTKNQVKLTCLVKGFYPSDIAVEWESNGQPENNYKTTPPVLDSDGSFFLYSKLTVDKSRWQQGNVFSCSVMHEALHNHYTQKSLSLSPGK

SEQ ID NO: 377 - protein, 121 aa, Artificial Sequence
  Synthetic Polypeptide
QVQLVQSGAEVKKPGASVKVSCKASGYTFSTYWIEWVRQAPGQRLEWMGEILPGSGNTDFNEKFQGRVTFTADTSSDTAYMELSSLRSEDTAVYYCTRWGYYGTRGYFNVWGQGTLVTVSS

SEQ ID NO: 378 - protein, 106 aa, Artificial Sequence [sequence omitted]

SEQ ID NO: 379 - protein, 121 aa, Artificial Sequence [sequence omitted]

SEQ ID NO: 380 - protein, 121 aa, Artificial Sequence
  Synthetic Polypeptide
EIQLVQSGAEVKKPGATVKISCKASGYTFTNYGMNWVQQAPGQGLEWMGWMNTYTGEPTYADKFQGRVTFTLDTSARTVYMELSSLRSEDTAVYFCARAGGQLRPGAMDYWGQGTMVTVSS

SEQ ID NO: 381 - protein, 111 aa, Artificial Sequence
  Synthetic Polypeptide
DIVLTQTPLSLSVTPGQPASISCKASQSVDYDGDSFMNWYLQKPGQPPQLLIYVASNLESGVPDRFSGSGSGTDFTLKISRVEAEDVGVYYCQQSNEEPPTFGQGTKLEIK

SEQ ID NO: 382 - protein, 125 aa, Artificial Sequence; identical to SEQ ID NO: 1
  Synthetic Polypeptide

SEQ ID NO: 383 - protein, 5 aa, Artificial Sequence
  Synthetic Polypeptide
TYAMN

SEQ ID NO: 384 - protein, 19 aa, Artificial Sequence
  Synthetic Polypeptide
RIRSKYNNYATYYADSVKG

SEQ ID NO: 385 - protein, 14 aa, Artificial Sequence
  Synthetic Polypeptide
HGNFGDSYVSWFAY

SEQ ID NO: 386 - protein, 109 aa, Artificial Sequence; identical to SEQ ID NO: 5
  Synthetic Polypeptide

SEQ ID NO: 387 - protein, 14 aa, Artificial Sequence
  Synthetic Polypeptide
GSSTGAVTTSNYAN

SEQ ID NO: 388 - protein, 7 aa, Artificial Sequence
  Synthetic Polypeptide
GTNKRAP

SEQ ID NO: 389 - protein, 9 aa, Artificial Sequence
  Synthetic Polypeptide
ALWYSNHWV

SEQ ID NO: 390 - protein, 254 aa, Artificial Sequence; identical to SEQ ID NO: 9
  Synthetic Polypeptide

SEQ ID NO: 391 - protein, 20 aa, Artificial Sequence
  Synthetic Polypeptide
GKPGSGKPGSGKPGSGKPGS

1. A pharmaceutical composition comprising an antigen-binding protein, at least one buffer
agent, at least one surfactant, and at least one saccharide, wherein the pH of the pharmaceutical composition ranges from 3.5 to 5.

2. The pharmaceutical composition of claim 1, wherein the antigen-binding protein is an
antibody.

3. The pharmaceutical composition of claim 2, wherein the antibody is a heterodimeric
antibody that binds CD3.

4.-29. (canceled)

30. The pharmaceutical composition of claim 1, wherein the at least one buffer agent is an acid selected from the group consisting of acetate, glutamate, citrate, succinate, tartrate, fumarate, maleate, histidine, phosphate, and 2-(N-morpholino)ethanesulfonate or a combination thereof.

31. The pharmaceutical composition of claim 30, wherein the at least one buffer agent is present at a concentration range of 5 to 200 mM.

32. The pharmaceutical composition of claim 30, wherein the at least one buffer agent is present at a concentration range of 10 to 50 mM.

33. The pharmaceutical composition of claim 1, wherein the at least one saccharide is selected from the group consisting of monosaccharide, disaccharide, cyclic polysaccharide, sugar alcohol, linear branched dextran, and linear non-branched dextran.

34. The pharmaceutical composition of claim 33, wherein the disaccharide is selected from the group consisting of sucrose, trehalose, mannitol, and sorbitol or a combination thereof.

35. The pharmaceutical composition of claim 33, wherein the sugar alcohol is sorbitol.

36. The pharmaceutical composition of claim 1, wherein the at least one saccharide is present at a concentration in the range of 1 to 15% (w/V).

37. The pharmaceutical composition of claim 1, wherein the at least one saccharide is present at a concentration in the range of 5 to 12% (w/V).

38. The pharmaceutical composition of claim 1, wherein the at least one saccharide is present at a concentration in the range of 7 to 12% (w/V).

39. The pharmaceutical composition of claim 38, wherein the at least one saccharide is present at a concentration in the range of 9 to 12% (w/V).

40. The pharmaceutical composition of claim 1, wherein the at least one surfactant is selected from the group consisting of polysorbate 20, polysorbate 40, polysorbate 60, polysorbate 80, poloxamer 188, pluronic F68, triton X-100, polyoxyethylen3, and PEG 3350, PEG 4000, or a combination thereof.

41. The pharmaceutical composition of claim 1, wherein the at least one surfactant is present at a concentration in the range of 0.001 to 0.5% (w/V).

42. The pharmaceutical composition of claim 1, wherein the at least one surfactant is present at a concentration in the range of 0.004 to 0.5% (w/V).

43. The pharmaceutical composition of claim 41, wherein the at least one surfactant is present at a concentration in the range of 0.001 to 0.01% (w/V).

44. The pharmaceutical composition of claim 42, wherein the at least one surfactant is present at a concentration in the range of 0.004 to 0.01% (w/V).

45. The pharmaceutical composition of claim 1, wherein the pH of the composition ranges from 4.0 to 5.0.

46. The pharmaceutical composition of claim 45, wherein the pH of the composition is 4.2.

47. The pharmaceutical composition of claim 1, having an osmolarity in the range of 150 to 500 mOsm.

48-61. (canceled)

62. The pharmaceutical composition of claim 1, further comprising an excipient selected from the group consisting of a polyol and an amino acid.

63. The pharmaceutical composition of claim 1, wherein said excipient is present in the concentration range of 0.1 to 15% (w/V).

64. The pharmaceutical composition of claim 1, wherein the composition comprises 10 mM glutamate, 9% (w/V) sucrose and 0.01% (w/V) polysorbate 80, and wherein the pH of the liquid pharmaceutical composition is 4.2.

65. The pharmaceutical composition of claim 1, wherein the heterodimeric antibody is present at 1 mg/mL.

66. The pharmaceutical composition of claim 1, wherein the heterodimeric antibody is present at 5 mg/mL.

67. The pharmaceutical composition of claim 1, wherein the heterodimeric antibody is present at 20 mg/mL.

68. The pharmaceutical composition of claim 1, wherein the heterodimeric antibody is present at 10 mg/mL

69. The pharmaceutical composition of claim 1, that is a lyophilized composition.

70. The pharmaceutical composition of claim 1, that is a liquid composition.

71. The pharmaceutical composition of claim 70, that is a reconstituted lyophilized composition.

72. A method of treating cancer in a subject in need thereof comprising administering the composition of claim 1 to the subject.

73. The method of claim 72, wherein the cancer is multiple myeloma.

74. The method of claim 72, wherein the cancer is prostate cancer.
